United States Patent Application Publication US 2026/0191916 A1 - sequence listing, part 110

SEQ ID NO: 709 - DNA, 794746 bp, Lawsonibacter asaccharolyticus
  source 1..794746: mol_type = genomic DNA
aagagaacagaagcgaccgggtgggcgcggcatccgccgcgccctccctctttgcctttgagaggactgggaaaaggaggtagccccgcggtggagaagaattgaagatgttccaaaaaagtgtggattgacgctttgttcacatctgaataagataggtgatacatggcgctcctttttgagaaataggacaaagggggtggctcagcagagaaagtggagagaggagcggaaggggcgccggagaaatgaaacaagaggagggcatccaacgtgagagcgatgacaaaacggatcttatctttggcgctgacgctggccatggtgctgtcgctgtgcctgacggtccaggcaaagggctctgtgaccgtcactttggacggacgggccctggagctgaccgctcctgcctatgtggacgggaacggcaggacccaggtgccggtgaccatcggcccccagctggggctgacctaccagcagaaggagggtgaggtcacctttgtaaagggggaggccagcctgaccttccgggatggggagaagcaggccggcagtatgaccatggacaccgccgccgatctgtccggcagcgtaggctatgtgcccctggcctacctggcccgggctttcggcttccagctgatttggaacagcgggacccggacagcggccctgaccacgccggtggagggcttccaggcccgggacctggcggagatcgaggccccggcccacgattacagcgagagcaaccagctgcctctgaccggatacttcaaggcatccctcaccggtgagtttgccggccgtgaggtgcgctactacatccccgacacagcggtgatccgcccctattaccactttatcgccgtgcccgacggggtgaacgcggaccagttcctggtggacagcggctggaagcaggtggcggatgagaccggcgagtgtctgttcgtcctgctgcctgatcagaccacctatatgtggggagatgtggagcaggagaaggactatattgccgccgccaaggcatatcactccggcaatggcgcctatttcaccaccttcggtgagttctatctggtgggctatggagccggcgcagcccccctggaggcctgggctgcggagaacccccatctgatcatcagccaggcctatctcaacgggacgacgtatggcctggagaacctccgggcggccggagaggagtcctacggatggaagcacatgaccgacggggatatccgggaccgggacggcgacggcatcaacgagcgggtggatgagaacggcaaccagaagatcctgtatcagatggcggaccggctggatcagatcctgaacccggacaaggggagcgaagcaggccttctgaccaagggtgatatgccccttcccacctggctggtcaacgcggagtccgacgacagcctgacctactggaagcaggtcaaccgggcggacagcgcagacgccagcgtgacagcactgggaagcgttccggtgagcgggcaggtatacagccagaaggaggacacctgggccaccgagtatgcgggccggatctccaaggtggtggatctggagaccgccgcagacacggtctcttatgacttcacccgtgctctgcgggacgagatgaccgactacacccggtatgacaactccatctcctacggcaacggcctgacctaccggctggattataccgacatccaggtggagcgcttctcctcccgggacaagcgggcggtggggaccgtcagcggcccggatctgaacgggaacgaggtggaggctgagatcaccatccaggccctgaccctggacgacggctatgtgacagacgtgctgctctatgtgccggagacagcggggacgaaggacatccccgtggtggtggtatggcacggcggctctcagaccgggcacctgttcatggattccactgcctggtggcagaccgccgcggcggagggctttgccctggcgctgcctacccgtaccaaccacaaccagggtacatcctccgactatgacctgcccatcttcgacaaggtggtccagtatttgaagaacgacggccgcttcgatatgggccggatctataccaccggccagtccatgggctctgtggccaccatcgcgctggcggagaaccgggcctcccagctggccgcggtgatctccagcaatgccggcgggcccagccgtctctccggcggcgacgccatccccgccggactggtggtgggcgaaggaaactacgccgaccggggcatccccggctatacggccgacaccagttatcccgaggacgacaccagcgtgctggtgcgctccactgaggctgccgccgcgggcgccgacatctactgggacgcggccaagaacctgaagggcgcgaccaatcacaacatgaacgactggatcgcctatttcaccgatgccaacggcctgggcgaggacagcctgagcgatgtgatcgtgtacagcggcggaaacgccctcaacggcggccacgatgatgcccagggcagcctgagcgattgggagagcaacaacgcccgctaccgtacctggaagtggtacaatgaggatgacatccccgtgatgacctacatcttctctctgtacgaggcccacaactgcatccccggtttccggccgctgatgtgggacttcctggagcattacagcgtggagaccgccgccgacggcacggtgacccgctattacagtgcctccgggtttgaacaggacgacgcggtcgtgatccagtgaccggcagatgacctccggggcggagccaaaggctccgccccaaattttgtcccggaagcccggcatacagatgaaaagcggcagagactacaaaaagtggggacaggtcaaaaaaatggagattgacggtttggagactggttattaaactggacatatccaaggggcattttttgggagatcttacaaggaaggagagacccggaaatgccatggaaaggaaaagaggaggttatcgattgtgcgagcagtgacaaaacgcatcctggctctggtactgaccctggcaatgatcctgtcgttagggctgaccgtacaggcagtgggcagccctgtgtccattgaactaaacgggacggccatggagctgacagccccggcgtatatcgacggacagaaccggacccaggtgccggtgaccatcggcccccagctggggctgacctatcagcagaaggagggggaggtcacctttgtaaagggggaggccagcctgaccttccgggatggggagaagcaggccggcgacatgactatggataccgctgccgacctgtccggcagcgtgggttatgtccccttggtatatctggcccggttttttgggatccaggtggcttgggacggagccagcaggacggtctctctgaccggcagtgccggcctgactgtggcagacatcagcagtattcaggcttatacggatatgaccttttatggtcaaggactggtttcggtggagatcacctaccgtccaggagtggatgtgagcggtgtgacagcgcaatcctacatcctggaggatcgggggaccctgtccccggactttgggcggatcgagatcgcgggtgtgtccgttcagggacagactgtgaccctgagtattgcggaaaacactggagccacttccaataataagatgatctataccggagatcagaaggagggctcccgggaacgcaacgcctttggcatttactgtaccggggcttggtaccgggatgtaaatggtgtcatttactacggtaaggaggacaccgcagagtatagggccaacaccaccggaatgggctaccaggcccggccctgcctggagctgaggctgcgccacaccggcgaggcagagagcgcttccgcctgcctggccaatgaaaagggtcagtataacgccggcggtctgtggaagcagaccattgacaccaattttggcgaaggcggcttccagacctttgaggagctgggcattcaggtggaatccactgcaaagaacgccaaggatgtggtcccggaccagtatgtccgcggctacctctatgtcccggaggattacaccggtgatgaggaagtccctctggtggtcaccatctcgggcaatggtacctccttctggatcctggaagacggcaccaataattttggtaccaacatcatgtatgatgcggccaccacctcctggatcggaaagggcgccattgtggtggggatccatgaccgctcgattatgggcggcaacggcgaggactatgactatctcctggacgatgtgaatgtgatcaagtatctcctggagcactacaacatcgaccgggaccgcattatcatccatggcaattcccgcagcaccatggcggccagcactatcatccaggcactggccggacagccctactccgccggacaggatgcggccgactggggtgaccgtccccgtaccaagaccctggataaatcggtatatgacttcgagatcggcgtgttcctgtgcaacaacggcctgtatggcgggcaggggctctggacctacgaggaccgcctggcggtggcaaagaccggtctgcgggcatggatctttgacgcggagcaggacttcaacaacattgattatgtggaggaacagatcaaggcgttcaaagaggctgggtacagcgaccagtggatcgcggagaacctgcgtctcacctgcttcccctctgaactgttctactactggggtgagagcgaccactccaccacccggatcaattattggtactttggagacggtgagatctattacggctctgactgtcatattgatgagaatgggcagctggtgtatgacagtaaggtgatgccgggcggaacttacaccgttgaggcccggggagccagccgctccggtactaaggcgggtcatgcatacaccgtgtatggggaaaacttccaggagtgggcgctggaaacaacatgaccgatcccacctatgcactgaagtccgtggggactctacggcagcgctatacccgccggctactctgagaaatgaatggctgacgatctgcaggtctccttctacaaggactacaagttcgccgagtggggcgtgaacaatcactcctgtatctcagtgagtgggctttgaccagaggagtgtaagatttatttgctttctctcttgctctgcggagcgtctccttagcgatatggggcagtccctctggggtctgccccatatcgtattttgaccaaggggaaggggagaagaaaaaatgtttatctttcaaaaaaatgtggattgacgttttggatattcaaaattaaaataaaactaaatagagcgtcttttttgacgaaaatgacaaaggaggggcgcaaagcagagggaagagaggaaatgcagaaaagagctctatccaatcaggagatcctgaaaagaggaggtcatcgatttatgcgaaccataacgaaacggctcctgtctctggtgctgacgctggccatgttgctctccctgggcctgaccgtccaggctgtcaacacggcggtaacggtcacgctgaacgggacggcactggagctggaagcgcccgcctatatcgacgggcaggaccggacccaggtccccgtgagcatcggcccccagctggggctgacctatcagcagaaggaaggggaggtcacctttgtaaagggagaggccagcctgactttccgggacgggtccaaggaagctggcggcatgactatggacaccgccgccgatctgtccggtgaggtgggctatgtgcccctggcctatctggctcagtttttcggactgagtctgacctggaacggcgctgcccgcaccgctgcgctctccaccggctccgacctgactgtggcggacatccagagcattcaggcctataccgacgagaccatgtacggcaccggtgtggtggaggtgcaggtcacctataagccgggtgtcaatgtcagcggcgtcaccgccgacagctacatcctggaggaccggggctccctgtcccccgactacggtcggatcaagatcgctggtgtctctgtccagggccagactgtgaccttgacgattgacgacggctctgcagccaccgccaacaacaagctggtctacactggggatcagaaggaaggcccccgtgagcgcaacgtgttcggcatctatgccaccggcgcctggtaccgcgatgtgaacggcgtcatctactacggcaaggaagattccggcgagtacaaggccaacaccaccggcatgggttaccagagccgcgcgtgcctggagctgaagctgcgccacgccggcgaggctgagagcgccgccgcctgcctggccaacggtaagggccagtataacgccggcgggctgtggaaggagacggtggaccgccagttcggcgctggtaagttccagtcctttgaggatctgggcatccggattccctctaccgccgcggcagctactgacggcacccaggacgcctatgtccggggctacgcctatatccccgccaactatgatcccgccaacggcatcgtgttcaccctgcagggacagggcatctcctactggaagctgcccgacggcaccgatgacgatggcaccggcatcatgtatgattccgccaccacctcctgggccaacaagggtgccatcgtggtcaacatccacgaccgctccagcgcaggccccggcgagtatttcgatatctatgatttcgtggtggacgatgtcaatgtgatgcagtatttcatcgacacctatggtgtgaccggcaacatcgtactccagggcaactccagaggcaccatggcctccgccttggtcattaaggctctggctggacaggcttacaacccccagaaccagaagaaggatgccggactggaggagaccagcactctgcccgagggcaagtatgacttcaccattgacgcctatatctgccagaatggtaccttcgggtacagctacgatgaggaggactgggccgccatcgctgctaccggcctgaaggtttgggccttcgacggagagcaggactccaacaacgtggagagcatcgctcagtacacccagatcatgaccgaacttaagggggccgactgggctaaggagaacattcgtcttaccggttacccctctgagatctatgcctactggggtgagagcgaccactccaccacccgtatcaacggctggtactttgatgatgccgctttctatggccccgacttggaaatcgtggacggccagatcgtctacaataccaagctgagcgacggggatacttataccctggactgccggggcagcgctgccggcagcagcaagcagggctataagtataccgtgtacgacgaactgtatcaggagtgggctctggacaagaaaggcgcctccgtcactgccggagctcccgccgctgaccagatcacctctatccaggccacagccgtggctaacttctatggctacaaggtgggtacagtggacatcacctacgccgcgggtactgacctgaccggcgtcaccgccgacagctacaccctgtatgaccggggcttcaataatccggagttcggcgaggtggagatcaccggcgcctctgtggatgggaacgtggtcaccctgaccgtcgatcaggggacggataaggtcaccgaccgcagccgtgagacttacggtaccctgtgcaccagctccagctggtatgtggactcagagggcaacgtccactacggcgatacccagaccaccgacgccctgggcatcaccatctaccccaacaccattaaaaagggcctgcagtggagagagaatatggacctggtgctgtgcgtcaacagcgacgacatcaccaccggtatccgctccactgacggcgctggcactatgctcgccgataccgtctgggagcccaccatcctggccgatgacctggacaaggtggagctggagatggtggatgtaggctggaaagctgcagactacactatgctgggcgatcagggcgaggtccccgtccatgttatctaccccgacaactatgaccccaaccgggcggagccctaccccgtcatcgactatcagtgcggcggcggcgtctgctactgggaggtcaccgacggcagcaccaccccggccaacaacctgggctgcaacgtggtctatgacgtgatgatgaccgagtggcaccgccagatgcctgacgccatcattatgagtgtcaacgtccactcctccacagtagagaattctgccaaggagatcgccggcgtgctggattacgccatcgagaactggaacgcggacaaggaccgcatcatcctggtgggcaactcccagggcaccctgatctcctctgacgtgatccgccagcgccccgatctggtggcgggctatgtggagtgcaacggcaacctgggcggcatggcgtccgctgatacggtggacggcaccctggcaaacagcagcctggggagctggaccgaggaagaggtccaggccatgatcgacaacgaggtgtccgtgtggatgttcaatggcgagaccgatggtgacaaccccgctgcccagcaggacgtgatcgagatcgtgaaggacctgtaccgggaagccgggaagagcgagtcctggatcgaggagcatgtccgggcctccgggctccagtcctggaagttcaaggattggggcgagaccgaccactccgttaccaaggtggtggcttggtactatttgggccagccctacatggatgtggagaagggcacctctctgaaggccggcgagacctaccagtattccggtaaggaggagagctacgagaagtatcagtacaccatggactatgtgtacacggtgtacccggagagcgtggcccagtgggcgaaggacgttttcgcctctgtgtaagcgcagatagagccggtcccgcaggccggcggaaggaagagcattactttgcttcctctctcacgctctgcggagcgtctccctaaaagagcgccgggcagacccgtaagggcctgcccggcgctcttttagggaaagggaccgttttttctgccccgtcataggatagggaaagaaatgggggcggtttggcatgaaaagggaaaaacagatgggggaggccccagcggtcctgtggcgggaggagaaaaagaccctgactctgtgcggggagccggtgctggaggagaccctggcctggccggagtttgaggggaaggggcgggcagtgcgccgcatgacgggctactaccggcgcctagtccggtcctgccgcctgcgctgggagcgggagacctactgcctggcctgcctgcggctggccgcctgccgggaggagtcccgggtcttccggccctggcaggcagggctgacgggagaggtagccatggagggggcggacctgctgagcatccggatggagctgcgggaggtgcggggagacgggaggcccctcctgtcctgttccggggtgacctgggactggaaagcgggcgcgccggttccgctgggtatgctgctgccggagcggagccgccggcggcagctgctggaggggatcaggcaggcaggggagggggagctccggagtgggagctgtctcctggacccggattggaaggagatggcgaggcgggactttcgggccagccgcttctgcctgcgcccggagggcatcgagctcttttatccccagtgttctctggccccggcggtagagggggtgctctccttccgggtgcccctggcgggggctgcgtggacggcgggggaagggacagcctcagagacataaagctggggcatggccgcatacctcttatttgaggtgatggtcatgctgctctcccgtctgaatgacgtcgtctggtccccctggctgctggggctgttcctggcagcggggctgtattactccctgcggaccggctttttccagatcttccgcatacccctgtggctccgcaccaccttcggagccatgctgcgccggcgggggcgggggaatgggcggggtatctcccagttccaggccctggccaccgccctggcttccaccatcggtacaggcagcatcgccggggtggctaccgccatctggttcggcgggccgggggcggtgttctggatgtgggtctccgccctgctgggcatgatgacagggtgcgcggagaagctgctctccgtgcgctaccgccgcgccggccccgcagggtggctgggagggcccatgtactacatcctggacggcctgaaaagcccgctgctggcgggctggtttgccctggcatgcctgccggccaccctgaccgggggagacatggtccagtccagctccattgccgccgccctccaggccaccttcggatgggaccggctggcggtgggggcggccgtcgcggtcctgacggggctggtgatggtgggggggatcggacgcatcgcccgggtgagcagcggtctggtcccggcgatggcgctgctctatctggggggcggggcggcggtgctggctgcccgggccgaccagatcccggaggcgatggcactgatcttctgctcggcgctccgaccggaggccgcagtagggggcggaatgggatacaccctggctgccgctctgcggtacggggtggcccggggggtgttcaccaatgaggcggggctggggacttccgccatggcccacgccgcggcagaggtggactgtccagcccggcaggggatgtgggggatcgtggaggtgtgcgtctccaccctgctggtatgcaccgccaccgccctagtcatcctggtcagcggggtgtacggcccggcggacgccctggtccggggggcgttgggggcagtgcctcctgaccggctgggggcgccgctgacggcggcggccttctcctccgtgctggggccctggggtggggcggtggtctccctgagcctgctcctctttgcgttctcatccatcctgggatggagctggtacggggagcagagcatcctctacctgaccgggtccaggcggctggtccccgcataccggctggtgttcctgtcctgtgtggtgctggggagcgtgtgggagggggaggcagtgtgggagctggtggacctgtgcaacgcgctgatggccatccccaatctgacggccctcctgctcctctccccccaggtgctgcgggagctgcgggactgggagcggaccggaggataaaagacaggggccgcggaagtttccgcggcccctgtcaagggggaagatcactttgagacgagttccggacagacttcctcatagaagcgctgggctccgtcgtgaagggggatggggaggtcctcacacagaaaatcccggtcggacaggacagacatggcgggatacagttcccccatgatatcggcagactcccacagggcctgggtcatggagtaaaccagctcctcgtccatggagacgtctacacacagcaggcacttgaccccaaaggtgtctacatcctgggactgcccggggtaggtgccggcggggatgacggcggggtagtagaggtcgttctgggagaggatcagatccagctcctcctgggtgtagcgcagcaggcgggaggggacccgctccgggagctgagccagcccgctcaccggggcgccggtaaagccatggatggcgtccaggtcgccgctgaggatcaggtccgtacctgcccccaggctgcagttttccagtacagtcccatcgccatccagcctcagggcgttgatcacagcccaggtggccagctcggaggcggagccctgagggcctgcgccgatgcgcattcccttcaggtcatggacataaaacgcgccggtgcgaatgggggacatccagttggaggtgctggaaaagacagcggcaacggcccgcaggtcttcattagtgggggcgctgtcctccgtgccgtagacagcggtataggcggagtcgcccgccaccagccccaggtcgatctcgccggaggaaaggttctgaatgttcatgaaggagcctgtggaggtgctgatgttgaacttcagctggtcggtgctcaggacctgggcgatggcagtgcccacgggggtcatagtgccaccggtgtctgcggtgccgatggtgagcacgatcaggccgtccgcatccagcggtgagatatcctcgggctgcgatgcacagccgccgcaggcgaggcatagggcggtcagacatgccaggaccgccttattgcgaaaaaaccccaagagaccaccctccctatccatggaattcatgctgctgtctctactataccacagatgtggaagattttacaacctcaaaatacaatgggacaggggcgcgtatcagatacgcgcccctgtcccattgtaaagagggaggtgaatcgatttagtgagcaagaaggccgccaaacacggagaggaaaatggggttatagatatcgtcgataatgacggcgaaagagggatacagcacccaggccacattgtgccagccgtactgatccataacagccttctcattggcaacggcattgggaccagagccgcagccccagccgcagttgccggcggccatgacggcggcgccgtagttgcggccgaacatgttgtaggagacaaagatggcgaacagagccatgagcgctgcctgaagcagcaggatgatgcccatctgcccagccacgtcagccagagcagtaatgtcgatggtcatcagcaccagggccagatagagctccaggaacatatgctccagggcgtccacctcgggggtatagaacttgatgtgggcggcctccatcacattgcgggcgatggcgccggcgaacaggcagccgatgaacttgggcatctcaatcatggggatgttgtccaggatgcagtagatgggcatgcccagggcgcacagcagcaggaccatgccgaacatggagaccatgcggctgttgctcagttcattgatcttgccgtcagcggccgcctcgggcttgtcgttggggtccgccttcaggtggtggcggctgataaggaacgcagccacagggccgccgatgagggagcccatgatgttgcccagggtgccggcggtgacgcccacggtggtggcggactcaggggcaccccaatcgatgaagatggggccgaaagcggaggcggtgcccacgccgccggacatggaggcggaggaacactgaagagccagataggggtccatcccgatgaggttgcccaccagtacgcccagcacgtcctggagggtgatcagcaggcaggcggccacagcgatcatgatgcacagcttgccgccggcgtgccggatcagcttccagctgaagccgaagcccacgcacataaagaaaatgttctggcacaggtcctggatggtcttgacatcgaaggaaaaggccatcacgccagatgcctttagaatggcgactgcgatagagaacagcaggccggagaccacaggagcgggaattgcaaattttttcagaagcgcggagcgcttgacgatggcgtggcccagaaagatcacaatagctgcgaaaccaaggctggtgagatactcgaactgaaaggagctgaccgctccatccacaccagctgtgtaggtcccgaaatagccaaggattttttccaaagtcatacacatctctctcctttctttcctgcccggcagtccgccggacacacaccttttacaataaagattctataaagacaaggggaagaagtcaatttatcgtaattattgaagggcttttgtaactattgtaactgaataggcccccaaaatcaggctgtgcggaaagaaagctgagcgggaaggaaaaagcaggcatcggtcctgcgatgcctgccgggagggatagggatgatattcagctgtgcagcctcaggtagcggatggaggggcggcctccggtctggtaatcgatggagctggtgatctccccctgatccaccatgtagttgacatagcggcgtaccgtgatacgggacaggcccacatgttcggcgatctgttcgctggtaaagaagtgctccgggttctcatcgaaaaagcggcggatcctggacagagtgctgaaattcacgcccttgtccaagggcgtaccgggaggcactgcctcccggtgatggaccagctggtcaatggcgctctggtccatgctgccgggcccctgctccagcagccgcctggcctgaaggaaccggtccagcgcctgacggaagcgggggaactggaaaggcttgacaagataatccagcaccccccgggcgagcaggccctggacgatatgggtgtcgttggcggaggtgaccgcgatgatgaaggggctctcccccagggtgtggagctggtctacgaattcagtgccgttcatgcccggggtgtagtagtccaggatgatcagatccgccttgagctccggcaaatgggccaaagcctctccgccgctcttgaaggtgcggaccacacggaactggctgtccgcctccacgtactgcttgtcgatggcggccaccatggggtcgtcctcgatgataatgacttggtacatccggtctcactcctctctggtaaaggtcagggtgaagcaggtgcctaccccgggctcggtctccagctcgatgcagcctccatgctcgtccaccagccggctgatcagatataggccgaagccacgcccctcccccttagaggagaatcctttgtcccagatgtggggcaggatgtcgggggcgatgccgccgccggtgtcctcgcagaccaccagattgcagtcagggcggcagtacatggacagcttgatctcccgcacctcgctgtggcttcggctgagctcgtcgatggcgttttccaacaggttgcccaggatggtggcatagtcctccggggagaggagcaggtcctcctcccggcagaagctgtcgtgggttacggtgagcaggatgcccagctcggcggcgtgcatcatcttcccgatgatgagggcgcacaggtgggacacccggatacagtccgccgtctcccggatggactggctggtgaccagactggtgttcatgatgaactggacagctttctggctctcgccggtctggagatagcccaggatgatgtggagcttgttcatgaactcgtggttgaaaaagcgcagggtgtccagcatgtaacgggcgccggagagctcgtcggacagcttgcgcatctccgtcttgtcgtggaagacgttgagcaccccctgggagccgttctcccccaggatgggcacctcactggccaggatctggcgctcctggatgacgcaggagcggttgtgcaccgcctgcccgctgcgggccacctggatgcagcccgtctccgggaagaagcgggtcagcggctgtccctccaggggggtggagccgcactggagcagggtccgggcctggtcgttggcaaagaccacctgcccccgcaggtcggtggccaccaggccgtcctcgatggagttgagcaggtcgtcctgctgtaagtagaggtccagcagttccttggggtggtgcccgcggagggagcccttcagcagatggacgattccacgggcgagcaaaagggccacaccgaacatgccgcccagcaccagagagaagagcagcacgagattgaggctgcgctggagaatgtcggcccggaagatggccacggtgacaaagccgatgatggagccagacccgtcccggaccgcatggaaagccacccgctggttgccgtgggtgccgtagccggtggtgatatagggcggggagccggacaggatggcagtctcctccccggctacaaaggtctcgccggtctccaggcggctggtgtggtaaaagcgcagaccatttcggtcatagacagcaatgatgtcaataccaggaaaattctggtgcagggaatccagcgacccggtgacctcctgggtgggatagccattcgccagcatctccgccacgccatccatagaggccacataggcggcggtgctggagatggtggagtcgatgctctgactttggcgggcgatatcgaaatagagggtgatccccagagagagcatcagtagcagggcggagacagcagaaaagcttaggaagagctgccgctccagggagaggcttttgatcttttgcagcatggagtcacctccgcgatcgagggtcggccagggtcagagctggttccggtcccgaagccagctggggagggtcctggcccggatgctggagacgatgcccatggcggtgtaaagggtgatgatggaggagccgccatagctgaaaaaggggagcgtgagccccatgacaggcaggatgtacaggcacatacccacattgaagaatacctgggccagcagcatcccggcgatccccatggatacataggcggagaagggggagctggcgttccggcccacccagtaacaccgcaggatgatgagggccaggaccaggagcagcaggaggcagcccaccatgccaagctcctccccgcagacggagaagatgaagtcggtctgtcgggcagggagagcggcactgtatgatgcctgagtctgggtgccgttgaggtatccctggccggtgagctggcccgagccgatggccagcagggaacggctctgctggaagccagcccccagcggatccaggctgtggtccaatacgaccataaaccgattgcggatataggcgaagcggtcactctggaggatggtgaaccaggccccaagaatggcacccacgaagcacgtcccgcccagagcgaaccatcgagccttcacccccgccatccaggagatggtgacgaagaggaacagatagatgacgcacataccgatgtcaccgcagaccacggcgatcagccccaccatcagcagggtatgaccggtgagctgggccacggagaagggggagctgatgtcccgctcctgctggtggatgcgggcggcctgccaggccagaagcaggataaaggggatcttgacaatctcgttgggctggagatccaaggggaagtgggggatgatccggtccagagcgagccagttccggttgccccccgattcctttcccaggggggtcaggagcaggagaatgaagcccacatcaaaggccaccagccacttccagcacttctccacgaacagctggaagtccacaaaggtgaggacgatatagatgaccacgccgatgcagatggcgacggcctggacgatcacgttccgattattattatcgagatagcgggtggcgctgtagatcagggccaggccgtagccgctggccgtgagacataggaacagaaggagcacatcgcccttcttgaaaaactcccggatgggggaaaacagggtggtcacgttgtcacctcttcagtagggggaaatattttctttcaaattattattttaccgcctttgtgtgaaaaagtaaactgacagttctgaaaaaagggcggttgggaccgcgtttcctcccggcatgtggaactgcgggcgggaaaagcatgaggacggcggaaacatcactggaaaagcgtgggggacctgtgttataatcggaggcgagaacgtggagccgcgatgtccgcggggagaggagcgagcatggaatttgtgaccaacagccccgaggagacggaggagctgggagaacggctggggcgggccctgtccccgggggatgtagtggcctttaccggggacctgggggcgggcaagaccgcattcacccggggcatcgcccgggggctggggatcggggatcgggtgaccagtcccacctttgccattgtcaacgagtatgaaggggggcggctgccgttgttccacttcgacatgtaccgcctgacctcctccgacgagctgttcgacatcggctgggaggactacctggcccggggcggcgtgtgcgccgtggagtggagcgagaatgtggcggacgcgctggagcgggacactgtccgggtggacatccgccggggcggggaggagagcaggcgggtgatctcggtggagcctgtccccgccggattttgagcagagaggggagatcgacgatgaaaatactggcccttgagacctcggcggcggcctgttccgccgccctgtgccaggacgggaccctgctggcccagagctggcagaacagcgggctgacccacagccggaccctgctgcccctggtggacagcatgctgaagaactgcggcgcgtccctgaaggaggtggaggtaatcgccgtggcggccggccccggctccttcaccgggctgcgcatcggcgtggctaccgcgaaggggctggcctggccggaggacaagccctgcgccccctgctccaccctggagtccatggcctggcctttggcccacctggaggggcgggtcatcgtgtgcgccatggatgcccggcgcagccaggtgtacaacgccctcttcctggccgcaggggagggcctccagcggctgacgcccgaccgggccatcggcctggaccagctgggggaagagctgaaaaaggtggaaaaagagaaaattgtagttggagacggggccaggctgtgctataatactttaacagagcagggtatcaccctgaaaatggccccggagcatctgcggatgcagagcgcctggggtgtggcccgcgcggcgctggagctggtccgttcaggcggactggtctccggagaggagctggcccccgtgtactgccgcctgtctcaggcggagcgggagcggctggagcgggaagctaaatcaaaataaaaaggggagcgtttcagatgtttgacagcaaagtccatgttttggatcacccgctgctccagcacaagctgagtatcctgcgggacgagcgcaccggtgtgaaggagttccgggagatcgtgtccgagatcgctacactggagtgttatgaggctacccgtgatctgcctctggaggatgtggagatcaagactcccgtggccaccggcaccttcaagtgcctgacggggaagaagctggccattgttcccatcctgcgggccgggctgggcatggtggacggcatcctgacgctgatcccctccgccaaagtggggcacatcggcctgtaccgggacccggagaccctggcaccggtggagtattactgcaagatgcctcacgacatcgccgagcgggacgtcatcgtcctggatcccatgctggctaccggcggctccgccgtggcggccatccagttcctgaaaaactatgagtgcaggagcatcaagctgatgaacatcctggccgcccctgagggcatccaggcagtgcgtaccgcccatcccgatgtggacatctatgtggccgcggtggacgagaagctcaatgaccacggctatatcgtccccggcctgggcgacgcgggcgaccgaattttcggcactaaataagtatcggatacaggcaaggcggcgggcccctctggcaggaagggtccgccgcctctgcactgttgtcattttctggggtgctggggatgaaagggagacggcgagggaggatttgacaggggcgcggaattcctctataatagtaaaaaactgcaaaaggaagcggcccgagccagagagaggccggaatggaggagcatgtgatggacatccatgtgggagatgtgctgaaaatgaagaaggctcacccctgtggaagccaggagtggctggtcctccgggtgggcatggattttcggatgcgctgtctgggctgcggacacgaggtgatgcttccccggaacaaggcggagaaaagtgtccgaaaggtgtatcgggacggcacggaggtcaaactggaggcgcgcccggcaaagggcggccaaggaggaggggaagaggcatgaatcaacaatactggagcagccggatccagggactggtgccctacacccccggggagcagcccaaggaccggacgttcatcaagctgaacaccaacgagaacccctaccccccttctccccgggtgctggaggccatccagcgggaggcggatcagcgcctgcggctctatcctgatccggagtctgccgcgctgcggggggcgctggcggagcactatggcgtggagccggagcaggtgttctgcggcaacggctcagacgaggtgctggggctgtgcttttacgccctgttcagccccgggcggaaggtggtgttcccagacatcacatacagcttctatccggtctataccgagctgttcgggctggactatgaggagatccccctcaacgaggacttcaccctgccggtggagcgctttctgagggggaacggcggcgcggtgatctgcaaccccaacgcacccacgggccaggccctgcctttgtctgacatccggcggatcgtggaggccaacccggcagcggcggtgctggtagacgaggcctacgccgacttcggggcccagtccgctgtggagctcatcgaccagtatcccaacctgctggtggtccgcaccatgtccaagtcccggtccctggcggggatgcggatcggctacgccctgggcagccaggacctgatcgctggggtaaactgcgtgaagaactccttcaattcctaccccctggaccggctggcccaggcggcaggggaggcggccgtgcgggacacggcatattttgaggagacccggggcaagatcatggcgacccggacgtgggtcacccacaggctgcgggagatgggtttccaggtccatgactccagctccaatttcctgttcatcgcccacccggaccactccgggcgggtgctccagcaggggctgcgggactggggcgtgctggtgcgccggtttgaacgccccaggatacaggaccatctgcgggtgtccatcgggacagacgaggagatggaggccatgtgccgggctatggaagagattttgaaaggacagtgacccatgcgatacgacagtgacctgctgtaccgtcccccaggggagtggcgcagctatctgctccagtgcaccatcgggtgttcccacaacaaatgcaccttctgtgccatgtacaaggagaagaagtttcgggtccgcccggtggaggagatcctggaggacatcgacatggcccgcagctactacgggcccaatgtggagcgggtcttcctcatggacggggatgccatcgtgatgaggacggagcagctgctccagatcctggagaagctgtatgctgccttccctaagctccagaaggtgaccacctacgccggccccaggagcaccctgagcaagacgccggaggaactgcgcgccctgcgggaggccggactgacccgggcctatctgggggtggagagcggcagcgacgcagtgctccaggccatccaaaagggctgcaccgccgcggagatgctccaggcgggccagaacctggtggcggcgggcatcgacctgtgggccatcgtcatcctgggcctcaccggccaggggggcgactgggaggagcacgtcctgtccaccgccggcatcatcaacaaaatgaagccccgccacctctcagccatgacttttgcccctgcggcgggcaccccgctgggggaggacgtgctggccgggcgctttcaggtgtgtaccccggaccagatcctggaggagtgccaccttctgctggagcacctggatgtggaccccctccacttcaccagcaaccacgcctccaactacctgcccctgaagggggggctgccggaggaccgggagaagttcctctccctgatcgaccaggcgctggaaggcaagatccgcctgcgcaagaccctgaatcgggggatctgagatgtcccgaaagtgaagaccgccccgccggagcctttggttccggcggggcggtctttatcggttcagcggcggcggcgtcccagccacaggtccgtcccgataaggatggcgcaccagagcaggatcagccccccgatgagcagagcgcagttgcggaaaaagacctccggcaggatcaggatgatctggtccaccgccgggtcgaagagccagttgtccttccccgggaagaacagggcgtggaataccacaaaagcccgctcaaagtccagggaggccagcaggcccaccacggcgaagacggtgcccagccccgcggcagcccagaagccggggccccggcccagaagggggcggggcaccaggcccatcctccggcccagcaggaaccagaggagcaggagggcggcagacaaggccagcacggccagatccagcaggaagaggacccgcacatcggcaaaatggtcccggccggactgtgaccaggacagcgcgccggtggagaactccggggcgcccaggcagaagtccagcatctcgtcataggcatggcggatcgcctcctctgtcaggccggtagcctggaccagccccagagggccgatatgggcgtaatagaaagggcggcagaggatggggaccgccacagaggaggagagcacgaggcaggccgtaaggacggccagcaggacggacaggatcttactctgtttcatcagggacacctcccgtagggatgaccagaccggacaggacgatgagcacctgcccggggaggtagaagagccacatccctacctgggccacggaagagagggggggagggaagaggctggggaactgagagactgcgaccagcatgtcgcacatgaggtagaggagcagtcccagggagaagaggcggcccccggcgtcccgcagagacaggctcagcagggcgttgaagaggaagtgggagaagtagagggccgcggctgcggtctccggtgtgaagagctccagctggtacagggccaccagaagcagggagaacagaaggaacctgggaatgagcagggcatggcctccgttggccttacagatgcggaccatatacgcaacctggaccccgtaaaagaggaggatgcccaggaggtaccagcggtccagcaccagcaggaagaggtcggccgctgcggtcatggccagcgcggcggccaccaggcggtctccgccccgggaagcccccgccagggccatgagcaggcacagcagcagggcggcatacttcagggcggtgctcagaggaccaggagagagcaggtccagggccaggaaggagaggtagagcgccccctccagcagcaaaaaagccggcacgctccaccggcagagccgctcgatcagaatgttctcctcccttccacaaaggctgtcccgttcagtgtagcacgaatgagaaaaaaatacaatccttgtcaacagaagaggaccgcagcgcccggaaaaaggcactgcggtccttgctgatgtcgtgaagcaggatggaaggttacttcgcggcggtgtttttcttcttgccgaagatggtcatgcagccctcaacagccagcacgatagccaggatgaacagcagcacgcccaggatggcctgcgcatagggggcccagtcggtggcagcgccggcggtgatcttgcccacctgagtgctgatggtctgagccagggaagtcagggtgacgatcagcatgaagatcatggggatgtagaacatcttgttgttcttgccgatgttgcccagccaggcacagacggccagcagggccagagcggccagcagctggttggcggcgccgaacaggggccagatcttggagtagccggtcatgcccagacccacgcccagcaccacggtgatggcggtggcgaccacggggttggtgaggatggccttgaagccggtggcctccttataggtttggccgggcttcagccagaactcctggaacatgtagcgggccagacgggtggcagtatccagggaggtcaggcagaagacagatacggtcagcaccaacagggagctgacggtggcctgtgtgcccgccaggccggggatggaggcgatcatgcgggaaatgccggtggcaaacacctgggtgggggtgacgatctcgccggaggcgtactcggtccagatgaaggacacagcacacagggagaccagggccagcgcacactcgatgagcatgccgccgtaggcgatgggcttggcgtcccgctcgtgatccagctgcttggcggtggtgccggagcccaccagggagtggaagccggagatggcgccgcaggcgatggtaacgaacagggcggggaagacatagcccagggaggtgccggtgggcgccaagttgtcatagaagccggtgaaggcgggcatatccatgtgggcagcgtccgcaccagtgagaccggccccgatgacgcccacagcggcgatggccatcatggcgtacagcaggaaggaggacagataatcacggggctggagcaggatccacacgggagccacagaggccaccagaatgtaggcgccgatgatccacatccacacggagttggacagatagatggggtgccagttcaggccgatgagcaggcagatcacgatgcccacgcagccggcaatggtggccactgccagggaggccccgcggcggtagacaaagaagccgaacaggacggccatgacaatgaacagcagggagatcatggccacggacgcgttggtggcagaggcggcggtgtccagcacgccgtccacataggtggcctggaaggtgctggccacgatggaggcgaaagcggccaccaccagcaccagggtcaggtaggaaaagatcaggaacagcttcttggcacggtcgccgatgttcagggcgaccacctcgccgatggactggcccttgtggcggatggaagcgaacagggcaccgtagtcatggacggcgccgaaaaagatgccgccgatcagcacccacagcaccacaggcatccagccgaatacggcggcctggatggggccgttgatggggccggcgccggcgatagacgaaaagtggtggcccatcagcaccggagccttggcggggacatagtccatgccgtcctccagctcatgggcaggggtgggccgggagtcatccacgccccactgcttggcaagccatccgccgtagaagatgtaacctacgatcagaatgacaatgccaatggaaagaactaacactgcattcatttaagtttctcctctccttaacttaaatttctggatctcgcgggccacaagaccactcaggctcttccccagatctttgccgctgcggttcgtggcgatgtcgccggtggacaggtccaccgctgctatacgaaactccatccatccatggagcgatagcttaaagtcccggtgcttcttcagcttttgaagctgggccagagcgtccgggtcggcctgatcacacaggaccacggccgacagataggtgcacatatgctgggaatgggggcggatgcgtggcatcccgtcctccagcgtgcgggcctgaagctccaccaggctggtgaagtccagccgggggagggagtataggtagaggtattcgtgggtctccgccgcccacagctccgcctttttgatcagtacgtactgagagccgcgggagtgataggcgcacagtgctttcaggggggagccgtcttggacgggctctacgtcaaaataggctgtgtatgcctccgagaggcgggcgaggagggtatcgcgcagttcagacacaggggacctcatttccatggggcgccataggcagaacagaagcggaaaccgattcccgctcccgcccaaataaaccccaaaattatgaataaaatgttaaaatcatgatagcagatttccacatattttgcaaggaaattcttcaaaaagggaggaaagaaatgaagatcctccatcaaattcttttgattaagatagaataaacaaaaaaataaagaagaaggagaagaaattgtgcagaaaaccgcgggatgggagaaaaaagaaaaaaagggacagcgctgtgcaggattaccgccgttttttataggggaaatatggagggcgtggggagaggggagacgttccgggggtttgacagcgggtgcgggattgagtacaatgggaaatcatgcgccaggccgcgccggcccccggagagagggggggcgcggagacggacagggcgctcttcccaaaagtgagtcccgcgagcggaggttgtctacatgagttgggaaagaatgactgctataggcccggcgggggagaacagatggagccgttggcggcggctgctggtcccgtccctgttttttgctggggtcatctactatgaagaactgtttttgaagctgttttgtttccacgccgtcacgccggtgggggcgctgttcaccctgttgttcaccctgcccatcgcgatcctgctgggactgctgtgcggcggggtcgccccacgaaaggggcgggtgctgctgccggcaatgaccctgctgctctccgtgtggatgggagcccagagcatctattatcacctgttcaagaccttcctcacagctttctccctgactaagatggggatggtggccggtgctttcggagacatggcggttggggagatcctgctcaactggttccccatcgccatgatggcggtccccttcggactggcggtggtcctccgccggcgtctgatcccggaggagggccccatgtccagaaggatgggggcacggtgggccctgctggcggcggtggtccagctggctgccatgggcatcgtgatgtgctgcggcgggggctccatgtccctgcgcttcatctatctccaggcggcggtgccggaactggaggtgcagaactttgggatgctgacccagaaccagctggagctgcgcagagtgctcttcgggatcaccccggaggaccagagcctccggaaggggcaggcgctccacctctaccggccggccagtgagccggtagaggtggagtccgcggagtatccctccgcggactatcacatcttggacatcgatttcgaccggctgatagcggaggagacagacgaggacctgctccagatgcacacctatttttcccagcaggtgcccacagcaaaaaatgagtggacgggctattttcagggaaagaatttgatctggatcgtggcagaggggttctgtaccctggctatggacccggagcgcactcctgtgctctatgagatggcccactctggctttgtgtttgaccacttctacacccctctgtggggggtgtccacctcggatggggagtacaccaccaccacggggctcatcccaaagtccggggtgtggagctactcccagtccgcaggaaattacatgcccttcggttttgggaaccagttcagccagctgggctaccggacgatggccttccacgactacctctatacctactatgaccgggataagtccttccccaacatgggctatgagtactatgccctggggcacgggttagaactggaagagatctggcctccctctgacctggagatgatggaagaaatcgttcccatgttcgtggatgaggagcagtttatggtctactgcctgacggtgagcggccatctgaactacacctatgaggagaacgccatgtcccgcaggcactgggacgaggtggctggcctgccgtacagcgaggggcccaaggcatatctggcctgtcagatggagctggaactggccatggagagcctgctcatccagctggaggaggcgggcaggctggatgacaccgtcatcgtcctttcaggcgaccactacccctacggactgaccgacgaggagtacagtgagctgctgggccgtcaagtggaccccaactttgagatattccagaacaccctgattctgtggaacgcccagatggaggagccggtgcgggtggagaagctttgctccagcctggatgtaatgcccaccctggctaacctgttcggcctggagtatgactcgcggctgatggcggggcgggatatcctgtctgacgaacccgggttggtgatcttctcgaattacagcttcctgacagaggagggggcatacaactcagtgctggatgagttccggtcctgggacggctccccgccggacgaggcgtatgtgcagagccagatcgccgaagtgcagaaccgggtggcctattcggccatgatcctggaccacgactactaccgggtggccctgaacgggccgcccagggaggaaggctccctgttcagtgcccatcgggagccccagccggactccggctggctggactgaatccaaaaatgcccggcccactcaatgcgttgagcgggccgggcattttgtatgatgggaaccggaccatagatgggggccggagagtctttggtctgtctcccgggcaggctgttgtccgtgcgggagacagtgggcgcaccgccgtgcgccggaggtgagacgcagcccggggagaacgggccgcatactcggggttgggaggggatggagccctccgtggattctggaaggggaaagccggatcgctccgaccacccatagaataccataccaggagggaaaaacatcaagaaatttgagacaaagcgtgaacgaattgtaaattgctatggaagaaaaaggacccagccttccggctgggtccaatggtttttttgaagggagctgagctcaggagagaatgcccaaatcggtccacaggtcgttgtagagggtgcgggtgtctaccgggcgcaccagataggcctcgcagcggtccagaacctcctggggggcagccatgatctcatagcgctccatgtccaggggttcgccataggtctcctcgtagtagtcgggataggaatccagggcctcctgattgggggaggcgtaccagatatagtccatatttttcaggctggcatcggtggaagccatgaagttgatccactcatgagcctcatccacattctctgcgttcttaaggatacacatggcatccacgaaccagttggagccctcctcggggaccacgtagaccaggtcctcattgttctccagcatgctcaggtagtcgccggcatagtaggtggccacggcggcctcgccggcctccatcttgtcgaagacctcgtccatgacccatgcctgatacacaccggccttcttggcctcagcaagcagatcgtaggcggcccgcagctcctcctcgctgtcggtgttgacggagtagcccagatccatcagtgcgatgcccagggcatcccgggagttgttgatcatcaggacctggtcggcatactgggggtcaaacatggcgtcccagctggtgatgggctggtccaccatggtgctgttgtagatgatgcccagggtgccccaggtgtaggggaccgtatagagattctccgggtcataggacaggttcttgaaccggtcggcgattttggaaaagttgggaatcttgtcgtagtccagaggctggagcatgtcctcctcgatgagctgggagatcatatagtccgaggggacgatcacatcgtagctggtgccgcccagagtgagagaggagtagagctcctcgttgctgggagaggtctggtagttgacttcgatcccggtcgcctcctcaaactgctggatgaggctctcatcaatatattcaccccagctgcacacgttgaccacccgcttttcggtaccggagccggagcagccagccagcaggccggcggacagggacagggtaagaatgagggaaaatgcttttttcaatggatcattcctccaatattctatggttttctattttcacggctgaaggccgcaaaaatcagcggcggagcttcctggccgccttctcctgactggcctcccgcaggttgatgacgatcagcaggatgagcacggtggcgaacagcagggtggagatggcgttgacctccggactgatgcgttttttggtcatggcgtagatgcgcatggccaggttggcggtggtggagccggcggtgaagtagctgatgacaaagtcgtccaccgacatggtgaaggcgatgagcaggccgttgacgatgcccggcttgatctcaggcaccaccaccttccagaaagcctgcatccaggtgcagcccaggtcctgggccgcgtccaccaggttcttgtccatctgccgcagcttgggcatgatggacaggatcacataggggatgttgaaggtgatgtgggcgatgagcatggtgccgaagcccagatagagcttggtgggcagatcggtgcccagactggcgttgatccactccgcagcctgtccccacagggagaaggctgccacaaagaacagacacatgctcacaccggtgacaatatcggcgttgaccatgggtatattgttgatggtcatcaggggaccgcgccagcgccgcttcatgttgtagaagccgatggcggcgaaggtgcccgccacggtagcgatgaccgccgccaggacggagactgccaaggtggtgtagaaggcgtccaggatcaggtcatcccgaagcagctcccgataccagtccagggtaaagccggcccataccgagcggctgctggagtcgttgaaggaaaagacgatgagtaccagaatgggggcgtaaagaaacacaaagaccagcgccatggagaggcggcggaagagagaggcggaacggctcatagcatcaccgcctgttcctcgccctcaccgaagcgattcattaccgacatacagatgaccacgatcaccatcatcaccagcgccacggctgagcccagataggggttataggccgagcccttgaactgcatctcaatcaggttgcccagcagaagatgcttgccgccccccagcagatgggagatggcgaaggtggacaccgcagggacgaacaccatggtgatgcccgagaggaccccaggcagggacaggggcagggtcacacggcggaacaccgtgaccgaatcggcccccaggtcccgggcggcttcgatcagccggtggtccagcttgacgatgaccgagtagatgggcaggatcatgaagggcaggaagttgtacaccatgcccagcaccaccgcgccctgggtgttgatcattttgaaatactcgatctccgtgccaaagaggccgttgatgaggtcgaacaggccgatagcgtcaaaaaaacggttgagcaggccggtgttctccaggatggacatccaggcgtaggtgcgcagcaggaaattcatccacatgggcagcatgatgagcatcatggccaccctctggaagccggctccctcccgggccaggaaacaggaaatggggtagcccaccaacaggcagatcacggtggcgatgagggccagcttgaaggaccgggtgaagaccaccgcgtagtcccagatgcgggcgaagttgtccagggtgaagccgcctccggcggaagaaaaggcatagatcaccaccatcagaatggggatgaccacaaagatggccatccagaccacataggggatggaaaacagggagagcttattccgcttcatctccggcctcctccccctctgcctcctcggggtcataggcggcgtcgctgatctcgtcatactcctcgctgtaagaggagtagtctccaaacatgccggagtaatggctcttcttcatcacgtggaagccgtcgggatcgatcttgatgccgatacggctgcccaccggggacaggtccgtggtctggatcagccatttgaagccatagaagtccacgatgatgtcatactgcatccccttgaaggtgacggaggtgacggtccccttcagctggccctgctcctctggcacgatgtccacatcctcggggcggatgaccacgtccaccggctcgttgggggcaaagcccttgtccaggcactggaaacggcggttgaagatctccaccacgccatcggtgcgcataatgccgtcgatgatgttggactcgccgatgaagtcggccacaaaggcattctgaggctcgttgtagatgtcctccggggtgccgatctgctggatctgccccttgtccatcactaccaccgtgtccgacatggacagggcctcctcctggtcgtgggtgacatagatgaaggtgatgcccatggcttgctggatgcgcttaagttcgttctgcatgtctttgcgcagccgcatatccagcgcccccagaggctcatccagcagcagcaccttgggacggttcaccagggcgcgggcaatggccacccgctgctgctgtccaccggacagggaagacacagagcgcttctcaaaccccttcaggttgacgacatccagcatctccatgacccgctcctggatctccttctcagtgagcttgactttttgacgacggatgacctttcccttctcgtcccgctcctccttcgccttggggatgcgcagaccgaaggcgatgttttcaaagacgttcaggtggggaaacagagcgtatctctgaaatactgtattgatggcccgtttgtgcgccgggacagcattgatcctcacaccgtcaaaaaatacgtcgccagcggtgggcgtctggaaaccaccgataatgcgcagagtggtggtcttgccgcatccactgggaccgagcagtgtgaggaactccttgtcatggatattcagcgtaatgttatcgagcacgacctcgtcgtcaaacgccatggtgcagtccaccaggcggatcaactccttggacatgtatcctcccccatttcctttcaacttacagcttgtcagctccctcggtctcattcccgccgctgtccgcagcagagggacagctggaggtcccggcggggattcacagatagcgagatacactatatccgcttaccgataaaatgtcaatggattttgtcgaaaatctcggtgaaatccccccgccggaaaaccgggaaagcccggccggagcaaggaaaactgggggtgcgccggagtgaggggagatcccggcggaccggcggggatcacagggaaaagccgggaaaatattccgtcacgaagtccacctgttccacctggaactgctgtccgtccagaggagccagcgccccggcgtcggtagtgaagcagaactccagccggtaggagtacagggcctgatagctgcggccgtagcgcttgttctgccgctcgctgccatatttgccgtctcccagcagggggtgcccggcggcggcgaactgggcccggatctggtgggtgcgcccggtgatgagctggcagcgcaccagggagagcccgttccggacggccagggtctcgtacagtgtgacggccgtcttggcccccggcctgggacggctgctcacggtgacctgtttttttgcctcatctttcagaatgtagccctccagccggccggcggggcgcgggagagttccgtggactatgcagagatagtattttttcagctcacggtcccggatcttctggttcatcacccgaagtccctccgccgttttggcggcgatgacgatgcccccggtgttccggtcgatacggttgcacagggcgggggcaaaggccccctcctggtagggggaccactcctttttctggtagaggtaggcctggatgtgggtgatgagcgtgttgacccgctccgtctcgtcggggtggaccaccaggccggggcgcttgtccactagaaggatgtgctcatcctcataaaggatcgtgagtttgggctggtagagggagagaaaggcgttttccggtgtgggggtctggaaaaactcgtcgttgatataaagctggagcaagtccccctggaccagacgcacgtcccgctttgcccccctgccgttgagcttgacccgcttgagacggatgtacttctgggccagcggggcggggaggagggggagggtcttggccagccagcggtccaggcgctgtccagcgtcgttcgttccaacgataaattccttcatggggcaagtcggtcccttccacagtattgagcgtgtgatatcctgccaccattccaccatattcttgtttttttgtcaatcccgatttcgcccggcgggccggcggggcgccgcaaaaaaattttttcctcaaatgcaaaaaagtatttgacattattccccgatttgtttataatactcgctgtaccattctgcgagtatggggtccataccccggagggaggttccatatgcggctggatctgaaggacatcatccacgttccgggcgcgtccaaggacttccaatttcagctggacctgtcccagctggagttttatggctcccatcccatcagccggccggtagaggccgcgggcaccgtgaccaaccacgccggggccttggagctgaggggcacggcccgctcccttctggacctggcctgcgaccgctgcgggaaggaattttcccgggaaaaggcggtgcctttggactgcctcctggccgatgagctggaggacgaggagaacgacgagatcgtgctcctggagggcagcgaggtggatctggacgagctggtgaccacggctttcgtcctcgcgatggatacaaagaacctttgctcagaagactgcaaagggctgtgcgccaagtgcggagcagacctgaacctgggtccgtgcgggtgcagacctgaagtggatccacgattggcggcgcttgcgcagctgttggatgatgaaaactgagtagtccgagaagtgcctgcgggagaaacgcagggcacgtaaaccgaaggaggtgtcaccaatggcggttcccaaaggaaaagtttcgaaggccagacgcgataagcggcgcagctcccactggaagctggagactcccggtatcgtgacctgccccaagtgcggtgcctatcggctgccccaccggatgtgcaagtcctgcctgacctataatggccgcgagttcggccaggtcgaagcccagtaataaaaaaagacgctgtgtgcaaacacagcgtcttttttttgtcctgctggctccaacaaaatttccccctggattttgcatcggggagaaggcaggaaagtttggaaggagtggtacgcctggaagagaagaaacagatcccgtggagacgctggaccggacaagcgtcaaaagagatgagatcctgctgggaggcagttttctatggggaaaactgggaggatccagactctggggacaacaaaagggtgctgagcaatgaaaaatttcttgaaatcccggggaaatgcggtacaatggtcttatatgacaaacaaaggaggtcccccaatgtccgattgtctgttctgtaagatcgtcgcgggagagatcccgtccaacaaggtgtatgaggacgagcagtgcttcgccttctatgacatcgatccccaggcgcccacccacttcctggtcatccccaaggcccacatcgcctccgctgccgaggtgacggcggaaaacagcggggtggtggcccacatctttgaggtcattgccaaggtggccagggagctgggactggacagctaccgcatcgtctccaacatcggggagcaggcggggcagagtgtaaagcatctgcatttccatgtactgtccggccgggatatgacttggcctccgggctgagaggagcctgctccccggggccccatcgaagatggggcggcgcctttgcgccgcagtttctccgccgcatcgcggcggagaaacccggagggcggatctactccgtccgaggataaagatatgggttcccaatggggccagccccattgggaggagcaggcggggcagagtgtaaagcatctgcatttccatgtactgtccggccgggatatgacctggcctccgggctgagaggagccccgagacggatctttgtaaaaagggcctggggggctgtgcacagccgcccaggccctttttagaatatcctacagagaacagttgcaaaagggaggcgtttcctttatgatagaaggaaagaggccgcaggccgagatgcggagaacggctggggagatttctcagactgggtatcgatacgaaactgcaaggagaccaatatgaatatcatcaagatcatgactcccaaggctctgaccgtgtttttacatacaggggacacggtgcgtcagggactggagctgctgcggcagcatggatacaccgccatcccggtgctgaatgaccagggagaatacctgggcagcatcacagagggggacttcctgcgtcatattttggctgtgggtaccaccgacaggaaggctcacgagaagtaccgcatcgggggccttctccgcccggacttctgcccgccgctgggtatccgggccactccggatcaggtggcccaggcgcttctgcggcagaacttcatccccatcgtggacgaccggaactgcttctgcgggatcgtcacccggcgctccttcatggccttcctggtggagcggacagatctggaggagctggaggcatccccggtgtaaagagaaaacctctgtaccgtgtggtacagaggttttttgtcagccttattccaatcacacagcgcgggtgaccttaccggaacggaggcatctggtgcagacgtacacgtgggtaggagtgcccttcacgatcgccttcacgcgcttcacattgggcttccagacacggttggaacggcggtgggagtgggagacctggatgccaaaggtgacgcccttgtcgcagaattcgcatttagccatgttgcttacctcctcgctatgagagtacgcttatagaagcatcgactgatataataccagatgttgcgtgaaaatgcaagagtttttttcaaaaactccgcttattctcaggagtggaagggcaggggcagcctgtggccggccgcccctgaaaattttacgggcacgctctggcagttttgacgaaaaaggagagggcagcatctcctgcctgtgtaaaataggacaagaaaaaacggctgttctcttgcgtgccgggtggaaatgagctatactaatccagaaccagaatataggagaggggtgcaccctgtgacagagacccaaaacagcgtccgtctgggcgagatcatcaaggaattccacctggagctcctccacgagggagaggactaccagaatatcccgctgcggaccctggacgtaaaccgccccggacttccgctgtccggcttttttgagcattttgacaccaagcgcctgctggtgatgggactgaccgagactacctatgtcagcggcatgagtgaagagcggcgccgggagagctttgaccgactgctctcctacccggtgcctgccctgatctatacccggggcatcgacccgttcccagagtgtatggagatggcccagaaatacgggcgcaccgtgctgcgcacccaggagcagacctcggcttttatgagctctctcatcggcagtctctacaaccatctggctccccggatcacccggtcaggcgtgatgatggagatctacggcgagggggtgctcttccagggagagtccggcgtgggcaagagcgaggtggccatcgagctgatcaagcgcggccaccgcatcatcgcggacgacgcggtggagatcaaggagaccaaccatggcaccctggtggcttccgccccggagctgatccgccactacatggagctgcggggcatcggggtcatcgatgtacgccgcctgttcggcatgggggccatcaagatgaatcaggagatcgatatggtcatcaagctggagccctgggatgacaccgcagtctatgaccgcctgggcctggagaacacctacaccgagatcctgggggtgcagctgcccgccctgaccatcccggtgaagccgggccggaacctggccagcatcgtggaggtggcggccatgaacaaccgcaaccgcaagatgggccacaacgcggcgctggagctgaccagaagaatggatcaacattttgcccggaagatgggtgtgggagatgaatgagatgtatatcgggcttgacatcggcggcaccaacatggtggccggactgaccaatggagcgggaaagatcatcaacaaggtgagccgtccggtgaacaaggcgtgggacccggcagagctgtgccgccagtccgcccagctggcccagcaggcggcggaggtagggggcttcgccgcagatcagatcaaggcagtgggcctgggcctgcccggtctggtggacaacaagacgggctatgtgatccagactcccaacatgccctttgacaacactcccatccgggagatgttccaggcggagtgggacgtgcccgtctatctgggcaacgacgccaactgcgccgctatcggtgagtactgggccggcgcggccaaggactgcgaccccgcagtggtggtcaccctgggcaccggcatcggaggcggcctggtggtgggcggcaagctgtacaccggcttcgcccagtccgggctggaggtgggccacatgatcatccggcccaacggcgtgctgtgcggctgcgggaaccggggatgctgggagcagtacggctccgctactgccctgatccgtattgcccaggaggccatggagcgggacccgggcagcgtgatgtgggagctgtgccagggggaccgcttccgcgtggacgggcgcatccctttccaggctgcccggctgggggacctgtcggcaaagaaggtgcttcaccgctatctcgaggggctgtccatcggcctgatcaacctggtgaacatcctccagccggagatcatctgcctgggcggcggcatcagcaacgcagaggacgacctgctgctggaccccctgcgggggctggtgctggcgggctgctttgacaagtccaagccgccgcgcctggagagagcctccctgggcaacgacgccggagtggtaggggctgccatgctgtacaagatgctgtaagggcccggctcccggccgggagagcagcggtggaacaagaacagggcggcctccgcagatgcggaggccgcctcggcttgtggaaaaagctctcctgtgaggaattccgccacccgcaggcgacggaataaaagtttgatttcgtcatttccaagggcgtgtacctcgggaatgacagtctctccgcccattgcctggctggcaggctcctgagaacgtccaggttcagaggacaaaatcctcgtccttcagcctggagaaatccgccttagccgggcggggagggacccgtttcaatgggtcgtacttgaaggatcggcagctggaaccggcagacatgacccccttccggtcgcagatcacctgatcctcgctcagggcgcgcccacgggcgcagtaggtgcagcggggttcgatctttttttgaaacaggcccatgaaggtccctcccaatgcgttgttgggaccattatactctctttggcctgggttttccactgctttttttcaccatatagacggccagtgccacaaagagcagccagacgccccaggcggccgcggtggagatggttagggcacgctgaaagtccaggctggcgatgccctccacctgttccgccaggtaggaggagaccggcgcctccagggggaagcggcggaccagcagggcagtgaaaagggcggagaggccgccatgaagcagcttgccggtgaggtaggtccgcagggacaggccgctgtctcccagaaaggccagcacctggcagtggacagagaggccggcccaccccagcatgaaggcggccatggacagccggccggtcaccgtgcccgctccggtgagggaggagaccccggaggagagctccaacaggccggtgatgagccgctgagcccatgcctgatccagccccaggggggagagcagagcggccgccccgccggccagagcgcccatgacgccggagagaaagagcatccggatgaccaccgtgaaaaacagcacgaaggcacagatgttcagggtggaggacagggccccggtgatggagtgggtgaaggccacggggaagctggctgcctggaactggggggccgcatgtcgtcccggccggggtccctcgccgggccggtagaagcggaagagcaggcctacgcacagggaagcggcgatatgtgccagatagaggagcagccccgcacggctgctggcgaagatcccggtgcccaccacccccaggataaaggcgggacctgaattgttgcagaaggccagcagccgttctgcctctgttttggagcactggccgttctcgtatagggcgatggcagtgcgggcccccaccgggtagccccccacaaagcccagggcgagggcggaggagcaggcgccccccacccggaacaggggggccatgaccccctccagcagacggcccaggtagcggctcatccccagctctaccaccagggaggagaggacaaagaagggaaaaagggaggggatgatcacattgccgcacagggccagcccgtcccgggcggcggccatgctctcctggggccagcgcatcagggccagaacagcgcacagcagagccagacccagcatcaagtcccggtattttcttctggagaacagacggcccatggggctcacctcccggcgcagagcgggccgcacggaacgtgcgcggtcccttatggatctatatgcgcgggcagaaaaaagatgccctttttctgaaacaggagagaaaactgccccggcgcggtctcaggaccgcgccggggcagttcagttggaagaaggggcttcagcccttagtgatggtcacagcgtcgttgttggcaaaggcggaggggctgtaatagcgggtgccgtcctcggccaggcggtagtgctccaggaagtcccaggccagccggaactcctcggggtagcagttgtgctcccgggccagggtgcgggtgaactggaccagggggatgctgttgctgtccgcccaggtgtaggtgtagtagcggccgctctcgtcatagctggagcaggcggccaggaagctggcgtggtcgttgggggtgaaggtcacatccaggccgttcatcttctgcgcgccggtgacccagtcatggatggaattgttatcaccggagagccagggagcggccaccaagctgtcgatgtcggcctgaccggccagcagatagctgggcatcatgctgtcagcggtaaactgggtgttgttgaaggaggtggaggccacagcggcgaagtagtaggcctcgctgttgtgggtcagggtctggaccgtccggctgcccaaggaatggccggtgccgtacacccgggtgaggtccatctggacaccagcctgcttgctgaccacctggtccagcagcagcagggcggagcgggtcatgttgacgttgtcctcttcatcgccataaatcaggctggaggcgctggagttgcaatactcgcccatgatgagcaggacgcagccctcgtcgttggccacggcccagtagccggagcagtccataaaggtagaggcggcctgagtcataccggggaagaccactaggacaggagcgccctcagcactgttgtttttcacagagtcggggatgtaaatcagagactcgcgggggtccaggacgccgttgctgtcatagtcgttgaaagcggagatgcaggagtacactgtaccgcccaccaagctaccggggacggagacccgggtggactccagggcccgcagctccacagtggcatcgctgccgtcatagccatcgaaggtataggtggcgatggccttgccgctctccgcagcagtccgggcagccttggtggcctgatagtagtccagacggtaggccaggttgttgctgtaagcaaattgataggtgtagcgggtgtaggcggccaggaagtcccggatctgggcggcgttcaggtcagcgccgtcctccacccggacctgagagatgccgtagcgggtattggggtcccatgtcttggcgttctggttggcatagcgggtagtccaggagctggaggagatgctttgacgatacagcccatccactgtggggacagcataggcgtcattgacgttcttccagtagctgacgctggcatccccctggggatagccggcgaagagggtgggcacagggacatccgcattggtcatgaacttcgcggaggcgatggcaccgtcgttcttcatgtcagtcagggtggcagtgaagtcctcatcgctatagccggggtgataggtgctcacgttatagccgttataggtgcgggcagcggcctggtccagatagccggagcccacgctcttgccgccgatgaaggcctggctgatgacgtacagggggttctcggcggtccaggactccagcaccgcgcagccctcgccgtagcctacatagtagttgcaggagtggccggtgaagaaggaacaggtggtgccgtcgctgagggtcaccttgccggtctggaccacgccgccgggggcggtctcgcgggtgccgccggcgtcgttgccgatcacctcgcccaggcaggcctccagataggcggcctcgctgtcaggggtgccccagccgccctggccgggctccaggacaaagaggagctcgccataggtgtcggcctgctccagccagccctgctcctgaaggaaggcgtaggggtccgcaatgccgtcgggcagggctatgacggtgatgtaggcgcggagggcggcgtgctggcccacatagagcttgaaggagcggccggcggcctcgccgtcctggaaggtgtaggtgtaatagccgatgacggggtgctcattgacttcagtgcggtcgatgggcagggagcgggtctcgccgctcctgctggtgtgggagagcagataccggttgagatcggtgggcgcggcggaggccgcggaggcgcccacagacaggcccaggaccagggccattgccagaagcagggacaaagctcgtttgcgcatgatgatttcctcctcattccctcgtttgttggtgcgtactgggcgcgggcatcgctgtcagcggagtctaaagacagcaattagacaaaatttacaatttttcctgcgctttcgtctttattatagctgttttgactgccgctttccagtgagaaattttaataaatggatggggaaaatgcatgggatggggtgagagaggggaaggaggtcagcggggccgggaagaggaccggatggaaagggcggagcatacccggcccagggtgaagcggtacatgccatataagaacagagagaggacgaggaccaccagggcgcagttggccaggccggccagctcgccgggagtgaagctgccgctgttgaagtacaggatcatggcgaagaaggcgtagatcagcagggtgcccgtgcacagggggacgaagaacacccgggagatctgcccctttaccgtgcggcggaggaaggcgttggaggcccccagatgccgcaggtcgtcatagacccgggcgttggtcatggcgatggtcatgcagcgggtaaagaggatgaccaccatagcggcaaagcagacgatggagacaaagacgaacagcatcagaaagaccgccatggtagtggtgaagtccgcctggtccagcacccggaagcggggcatgtatttccaggaattccggaagttgctggaatcccgctggtcatattcaatgggagaaaatccattgggttccagatgggccgggtccaggaagtagtagcccttctctgccagataacggtcccggaccaccgggtcccaaccgtcgaagagggccacctcggggccggagcggtccacgatctcgtcgaacagggcccttgcaaagaagtaggtgtcctcctcgtcctccacgtcaaagacggccaccacctcccgccattcatcgggcaggccctgggtgatgcgggcataatccccgtcgtccagcacccggtatcccagaagggaggtgctgcgcaggggctcggccggcgtgacggccagctgttccccggtgaggtggttggtgaccagggagatgctgttcccggcgccgctgctatccccgttgcggtcatagactgtggccgctgtaccgggttccagatccaggtcatccccggtaaggatgttccaggcgctctccgacaggaacacatcagaggcagtttcctcacagtaaaccacatcgtaggtggcgcccagggggccctccgatacaacatcggcgtagccgtcgtaggcgagcaccgcaccggactgctgggcgtagcgggtgacagtcactcccatctcctctgccagatggagcacctcctcccggccgggcatgtcctggtcagcccggtagtggaacaggtaatcgaattcccggtcctccgttgtggacgaggtgccgctgctcagcatagggatatagaaagcggcaaagtaggccccggcggccagcaccgtcaccaccaccatattccgcacggtctggcgtccctggaacttcatcatgctggaggtgatcaggtccctgtagcggctgctgccccgccgccagccgttgactaccgtgtggaggaggatcatgtagaggccggccagggcgggcagatagaacagggccgtcagggcatcgggggcgtaccagtgaaggaccaaaataaaaaatttgggggccatatagcccagaaagccgcccgccgccagcaggatgatgcccagaggaccgtaccaccgggggaccgcacggatgggctcagacttccgggactcgttgaccacgtccaggatgttggtccgccgcaaaaagcggcccagcataacaaacagcatgacaaccacaaagagggagaaggccagggccagcagataggcatgggggtcaaaggccagggccatctcctctgagtccaccagcaggagccggaacccctgccagatgaaccaggccagcggggtgcccagcagggcacccagggcacaggcagacagggacatcagagccagctcccccgtcagcacccggcgcagctggtccttggaggcacccagggccagcaggatgcccacatcccgggacttgtggcggaagaacaggccggaggcgtaggtggtgaatacgccgcagcccaggacagccagcacgaagatcatggtcatctgcttgcggctgtcgcccccctcgggaaagacggagagcaccgtgggggaacccatcatggaggcgtaggcggtgatgaggagcacggagacgaaacagcacagggtgagcagggcatactgccccaggctcttccgccgcagggcggcggtcacttgggagaaacgtgtcattgggcgctcgcctcccccatctcccgcaccgcgtccagcagctcgtcctggaaggtgcgtcggtccttctcgccgcgggccagggtgcgccacacccccccgtcccgcaggatgatcacccggtcgcagaaggaggcggcaaaggagtcgtgggtcaccatgaagatggtggcctccaggtccgccttggcctggagaaaggcgtcgatcaccgcccgggaggagcgggaatccagatttccggtgggctcgtcggccagcaggagcatggggtggttgatgagggcgcgggccacagcggtgcgctgcttctcgccgccggagatctccgccggatacttgtcccggatggcaccgatgccgaagatgccgcacaggcggtcggcggcctgctccatgtcgcctccggtctccccggcgatgatgcggggcaggaggatgttgtcccggaccgtgaggccgtccagcagcaggaagtcctggaacacgaagcccagcttcttgttgcgcactgcggccagggtgtcctcgtccagccgggccagctcctggctgcccaggcggatgctgcccgagtcggcggggatgtagcaggagatgcagttgagcagggtggtcttacccgagccggaggggcccatcacggccacaaattccccctttgccacctccagggacacgcccttgagcacctcataggtggtcttgcctacctgatagcttttgtgcagatcttgtacagagagcatagtgatccttcctttctgctcccagcatagcaggggaggtggatgggaagcaaccgcccctgtcacagacggcgggccgggtgaaaattttggggatgggatgtcatatttgaccgctctgctgtcaaacttggtttggaagggaagcagaaatgtggtatcatactctctgtacactgagagggagaaaaattccgggaaaacaggggccgccccggcggggaggcgcggcacaaggccatgggaggtggacggtttgcttcagatcgggatctgcgacgacgcacgggaatcccgcttccagctgcgggtgctgctggagcgggcgctggaggggcggtccgcgccggcgcggctgctggagttctcctccggagatgcgctgctgggctggatggaccggcatgcgggggagctggatctggtgttcctggacatcgagatggaggggaccaacggcatggacacggccagggccctgcgggaggcagaccagagcctccagctggtatttgtcacagggtacagtgactatgtgtttgacggctatgaggtgggagccttgggatacctgctcaagcccgccggggcggaggaactggagaaggtcctcacccgagcgctgaccgccctccagcggcaggaggaggagctcttcttctgccgcagcggtgaggtgttctaccgcatccggcgggacgccatcctgtacttccgctcagaccggcggcaggtgacctgcgtcacccccaggcgcgcctatattttttacgggaagctggaccaggtggctgcccagctgggggcggagttcgtccgcatccaccagcggtatctggtccgggcgggggcggtggaccgggtgacagggagcgaggtgtgggtaggggaggagatcctgcccatcagccgctcctgccagcgggaggcgctgcttgccttgacacgggcggcgctggagtagggagggaatgggaatgatcgttctgcctgtatggaaggagctgctgcaatgggggccgctcttgctgggaggcgcagccatgggctcgacagtggagcgggtgctggggccgtgccggagctggccgcgccggggggcgctgtatctgctgcttgggttcaccctggggctgcccgcctgggtgggggaccacaaccccatccttctgttcctccccttcctgacggtattcctcctgtgcggcgggggacgccctcaggcccggctggtggctggaggcatcttttatacgctgctggtccccattgggatgatggcggatacagtgctcaaacaggcgatcaacagtgtgtcgcacaacggggagagggtggggagcaatctggtgaagctggtatgctgggcggtgctggtgccggtgatctggaagctggtgcggagacctgtgcgcctgtcctcccgcctgtggaagctgctgggcgggctgacgctggcccccctgatggccaccctgtccttctccctatgggggaccggaatggtgggagacgagctggtggatcacttcgtggaggggatcgcctataccatcctgccctttgcctccctgtccgccctggccctgctggcagccctggccgtgctctcccggcacgaggagttggaggaggagaaccggctggccggactgcgggaggtgtactaccaggggctccggcaggagcaggcccaggtgcgcgccctgcgccatgacatgcgcaaccacctgtccgccctgctgggtctgctggagcggggcagctgggaggaggcggagcggtatctgcggcagctgggcggttccccagccctcaccggacacaggcgcttctgcggtaatgagaccgtggatgtggtccttgcctccaaggctgccgccctggaggaggcggggctgacgggggaatttcaggttagcctgcctgagcagatggatatcccggcgccggagctgtgcgccctgctgggaaatgccctggataacgccatcgagggggcagcgggggcggaggaccggacggtgcggctgagggcccgggcggacaaggggctgctgatgctgcgggtggagaatgccttgggacgtcccgtaaagcggggaccggacggagcctttgtgacaacgaagggggagcgggaggcccacggctttggcctggcggggatggaagagatcgcccgccgccggggcggctccttggaggcaaaggcggagggcgggcgcttccagctgacggtctgcctgcccctggatgggggaaactgagcctctggggacagcggagacagaaggcggggacagagcaagccccccggcgccgcggcgccggagggcttgctatttgtctggttcggttcaggactctgcttggtccaaatgacgcaggccggcgatgtcgctcaccggaacggagaagaccatagcctgggcgggcgtctgaatgccggcctgggccatgatggccttcatgatgttcttcttgtcctgggagcgggtcaggataaagaccaactcccgctcagaggcgatagagacgccgaaaaactttttggccagttccataccggtccccttggcgtggatggtggtcccgccagtggcgcccgcgccgcgggcggcctccatgacctggtctgtatgcccctgattggcgatcaccaagattagctcatgggcgatctctctctccatgggttcctccccctcctgattctgggtcagatattccttgacggacgtgccgccgatgctggacacgggcaccgtcatcagtacgccgttgcccggcacgtccagccacaggtcccgggccgccctgcgcaccatacaccgggaatggggggcaaggcagaacaggaccgatttttccgaggcctccagcccgagacagtccaggatctccgtggtggcggtcccctgtcccagcgcggtgagaaccagcgggatgtcacggccgcggaaccagttgataaacaactcacacttggaccggtcagtgatggtgatgataagatccaatccgctcatagcggtcactcctcctcgcgtcgtgggggcggcagcgccctcagagctcgatgatgtcatcatccgccggggcggtctgctctccgctggtgccattcttcttcaggcggtactgatagagcagtcccagcatctggatggtgatcagcggcgtcatggccaccatggccaccacgccgaaggcgtcggtgatgatgcttccgccaatggcgtcgcaggctcccatggcgaaggggagcagaaaggtggcggtcatagggccggaggctacgccgccggagtcgaaggcaatggcggtgaagatcttcggcgtgaaaaaggacatgatgatagcggccaggtagccggggatcagcagccagaagatggagatcccggtgagcacccgcaccatggacagtccaatcgacatcgccacgccgatggacagactggtgctcatggcccggccggggatggcaccggaggtgatctcctccacctgcttgttgagcacgtggaccgccggctccgcctggacgatgaaccagcccatcagcatgccgattgggatcaggacccagcgatagggcagggtggcgatctgatagcccagatagttgccggcgggcatgaagcccacattgacgccggtgaggaacagtaccagcccaatataagtatataaaataccgactacgattttcaagacctttttcttttttaatttcagggataccacctgaaacacgacaaaaaaggcggcgatgggggccagacacagggccacctctgcgatgtactcggggagaccctcctcaaacagcttccagagggcacggctgtccggaacctctgggatggagacaggggtgtaggccccagaggcggggtagagcagggagaggaccatcacggccaggatggggccgatggagcacagagccaccaggccgaagctgtcctgagaggcgtcggcgtcgctgcggatggaggagacgcccaggcccagggccatgatgaaggggacggtcatggggccggtggtgacgcctccagagtcaaaggcgatggcgagaaagtccccggggataaaggcggcaagggtgaacacgaccagatagaagcccaccaagagacggttcagggggacccggaacaggatgcgcagcagagcgatgacaaggaagatccccacccctacggccaccgccccgatgagcaccgggttgggcacgccggggacctgggtggccaggacctggaggtcgggctcggacacggtgacgatgactccaatgaggaagcttaccgacaccacgatccacagcttgcgggagcgggtcatggccgcgcctacccgctcgccaatgggggtcatggcctgatcggcccccagtgtgaacagccccatcccaccgatcagcagcaccgccccgatgaggaaagtcattagggtggcggtggggatgggagcgatggaaaagcacaggaccaaaacgatcagcacgatggggagtacggaggagagggcctcccgcagcttttccagaaggatggtcttgctctggcccatctgatccctccaattttgcatatgttcccggagcaaaatcatcacctcgatagagaatatcgtcccaattcctttgtgggcgccaatctccctgtggggccgggagcagaaaggggaaatttcggcccaggggtacaaagtggaactgagcaaaaatataaattattttatgcgctttgataacagtttaccatggttttgcggctggctcaaccaaaaagggagatatcttaatacaatcttaatgtttggggcaaaataggcagaaaacggccggacccgttagaacgggtccggccgttaccggaacagtggagagggatgcagcagtcagccgatgccgcccatcacggagcccagaatgagcactgccagggtgaccccgcagaacaggtactttcccaggggatagaaccaggggcctaagggcctggtccgggccaggttcacctgctcctccacgaactgcctgccgcagatccagaagaacatgaccgccgccagcagcgcacccaggggacagatgtagatggagcaaatgttcatccaggggtccacgatgggggcgatgaccagcccaaccaggatgcctgctcccccggtgatggctgcggcggcggggcgcttcaggtggaacagctcctggagagtggcggtaggcgcctcgaacaggttgaccagagaagtgagggccgcgaagatcaccgcagcaaagaaaaggatcaggatcagccagccgccggggatggtgctgagcacgttgggcagatagatgaacatgaggccggggccgctctggtccagctgctggccggccaccgccatggcggggatgatgaccagggcggccagcagagcggccacagtgtcaaagacggccaccatcctggcgtcagagggaacattggagctgcggctgaggtaggagccgtagatcagggtgccgtttcccgctaccgaaagggaaaagaaggcctgccccagggcatagatccacaccactgggtccagcagccccttggggtccaggacgaagatgtactgatagcccgctccggaagcgggcagggtgaacagatagacggccagcccgacgaagaggacatagaacaggggggtcatgaccttgttggccagttcgatcccacggccaatgccgaaagccagaatggcgatggtcaccgccatgccgacgagctgccagggaacatttccagcagcagtggcattgaagtgggcggcgaaagcgtccaggccggacatgcgggacagggtgccggtgagagcgtcggcggtgtacttgaagatccagccggtgacgaccgagtagccgatcgccaaggccagggagcccagcaccgggatcaggcccagcaggcggccgggccgctcatggccgaagcgcagcttggtggcatagccgaaggcaccgatggggccggagcgggtggcccgtccaaaggccatctccccgatcaccccggtagagccgatgatgaccacaaaaatgaggtacgggatgagaaaggtggccccgccgtactgggagacacgggcggggaagagccagatgttgcccatccccaccgcagagccgatgcaggccaggatgaacccccatttagacccccaggagtcgcggacagcgctgtgtttttccatggaaagacgccccttttcaaaaaataccgccggaacacgagaaaaccggcaggggccatgcgggccatgccgggtaacacttttttaattatagcacacgcttggaaaaaaggcaaagaaaacctggtcacgttcgttttcttaccactgcagaggcgctgggctgccgcagggaggaaaattttccccagactccggctgtaagatgtctccaaggggatacgtcgtgtgggtgggacctcgccctatacttaccctatctacacccgccgccggggtaccagcatatactgactgtcgagaaacagcatcccacgccacagatgcggggaacaaaaatagccacggccgccggaagaattggcagccgtggccgttatgaaagatacaacaaggcgagcatacaacagagccctccggacggcggaaggaccgctgccggagggaaagggggcggaagtgctcactccaggtcgatggcattgacagggcaggattccctggcctgggaggcggtcttctccagggtctcagtgacctcctgaatgggctgagccagtccgtcgtctccgatctcaaagacctccggacagatgctgacgcacagaccgcagccgatgcagttggaattgacagtagcgttcatgatgtgctcctttcctccccggccagcggatgccgcggggcgtatctgagcacagtatgcccgaaaagcagaaaaaatacacaaacagaaaaaggacaggcaggccccgcagggtctgcctgtccggtataacgtaggggaagaaaatcagaggatccggcggccgcccacgaagccggtggtgtagtaggcactgtccatgtcgctgatgatgacgccggtgctggaggtggaggcgtggatgaactggcccccgccgatgtagatacccacgtgggaggcacggctggcaccgctgcccgacttcaggaagaagaccagatcgccgggctggagctcactcatagagacggaggtgccgttgctcatctgagcggaagcagtgcggttgagggagcagccaaactgagagtagacatagcggacaaagccggagcagtcaaaaccgctgggggaggagccgccgtaacagtagggatagcccagatactgcatggccagatccaccacctcggaggcggagccggaagaggcggcctcggctgcgtcgataatggtcacatagtccgcggacacatagccctcttccaccttgtaccagccgtccagggtctccagaatggtgaggaccttgccagtagagaaggagtccaccttctcactgtcggtgctgggggcggagcggacattcaaggggccctccgtgaccttgccgtagacgggctccgccacagtgggcagttctacagtctcagacagcactacataatcggtggagacatagccctgagtatcctggaaggagacctggtaccagccgctttcggtaataccagacacctcaatctgggagccgtcggggatggtctccagaacggcggcgtcggtgctggaagcgttgcgcagacgaagaccgccctcggcgtccactgtgccggacacagcaaaagccggagcgatcataccggtgacagccagcaggccggcggtcagcttggcagcaaaagactgagaaaagtgcatggcggaagtcctcctgatcgtcatatctctgtttctggagcgcgggcggctctttacttcgtgctcagtgcccggtccagccagaccgtggccacgtccattgcggtgtataagctgtccttctctgtctttttgaccacccggtcccggctcttcaggtcgggatcggtcaactggagctgaacggccacctttgtggccacatccagatcgtccaccttcttagtgtccaggatctggagcatgatgatgtacttttcggccatcgtgccgtagtagatgaggttgtctttccggcgcaggggatggcccttataggaaagagggatcttttcagacgccatggtctgcctccttaaggaaattttaatgttgtaaccgaattgtaacacatttgaaaccctttgtcaaatactctcatctaatttttttctgggaaatggaggaaaggcggcggcagaggggatggaaagcggaaaaacggcctccggagctgcctctggagaccgtttttcgcctgaatggcggagatgcggggtcagaatatgctcaggctgagccggcggcccagctgttccagcagccggatgccagccagactgtttcccttttcgtccagcccgggggaatagatgccgatgcccatacgggcaggggagaccgccatgatgccgccccccacgccgcttttggctggcagtcccactttgacggcgaagtcccccgagccgttgtacatgccgcaggtcatcagcacggcgttgacatagtgggcatatcgggcggggaacagccgctcgccggagggggagcggcggccccggccggcgaaggtgcaggcgatatgggccaggtcccggcagtccaccctgatggagcaggcccggaaataacagtccagcacctcctccgggtcgtcatgaagcagtccgcagctctccagcagaaaggccatggcccggttacggctgccggtctgtttttccgagcggtagaccgcctcgtccaccgacaggctgggatttccagccagccggcgggtcagctccagcagccgctccagccgctgggaatagctcgtcccgtggatcagggtgcacagcaggatggctcccatgttgaccatgggattgagatgctcgctgagcagggcctggtccgtatagttgatggcgtcaaagggtttgcctgtggcctccactcccacccgggcgcggaccgtgtcctccccgttgtccatcagcgccaggaggagcaggatgggcttgatgatgctttgaatggtgaaggtccgcctgtactcccccgcggagctgatacgtccgtcgctggacaccacgcagatgcccaactcgtcccggtccgccttggccagctccgggatgtagccagccacccggccctcccgggtgaaggggcgattttcctccaccagcttttccagcagcgcgtccatgacgtccctcagtgcagctccagccacatggctgcgccggaggcgtaggcggcggcaccgtagatgagcgcctcctcccggaagcggatcttgggattgtggaggctgacaccgcagccgtcctgggcggtgccgcctcccaccacgaagaaggtggaggggacgcgggcggcgatctcggcgaagtcctcggaaccgctcattttctcaccccgctggagcattttcagtccctcccgctgccacccctgggcgacggcggcggcagtatccccgtcgatctggagggagcaggtggagcagagatcggtgacttgggctctgccccggaaggcctccgctgtgcaggtgcagatggtgtcgatccgttccagcaggtgggtgcgcagcggctcgctgaaggtgcgcagggtgccctccagcaccgcagaggaggggataatgttggccgcgtctcccccctggaacttcccgaaggtgaggaccaccagctcagcggggtccgcctcccggctcagcagctcctggagcgccagatggatgtggacgccgatgttgatagggtccacggtggactggggatgggcgccgtggcctccgcggccctccacccggatgaccaggtggtcactggaggcggagaccacgccggtgccgtagccgcccaggcccgctggaatcatggggatcatgtgggcacccatggccgcatccacatggggatcttccaggatgccggcctcaatcatggatctggcccctgacaggacctcctcgccgggctggaacatgaacttgacagtgccgttgagctctgctgcccggtcccggagcagctgggccgcccccagcagcatggcggtgtgcatgtcgtggccgcaggtgtgggcacagctgcgctgagaggcgaaggggagcccgctctcctcacgcatgggcagagcgtccatatcggcccggagcaggaacaccttcccgtcgggctttccggtcaaggtggcggtgacgccccctcccagccgccggggctgatagcccatctcggtcagccgtgccatgacataggaacaggtctcgggcaggtccatccccacctcgggatgctggtggaggtgccggcggtcccggaccatctgttcatacagcgcctgagcgctctgaagataattcatacgatgtactctcctttccggtcaccggtccccaccctggggaagatggaccacccggatctgccccatccggtacagcacccaggcgcacaggatgcacagggggatgcaggccaggatggcgatgccgcggttgactggtgtgacgaacacgtggatcagaaagaccagtacgccggggaggacggcggccttgagcttgcccttgatgatagtgccgcccgccttgctggtcatctggctgaggaacaggcacccataaagcgccgggagcatatagcttccggcgatcttcaccggctcgctctccagaatgggctggagagggaccagaaggaggacgcccagtacgatgataacggtggtcacgatagaggagacggccaccgccaccgtggccaccgcgtctccggcgtcggtattctgctccacatccgccatctccagggcgttcagggcgcaggggagcttcaggttggagatgttcccggtgatgaaggtgatgtaagaggcggagcccagcatggggacgtaggtgatgacctctgagatggcggtggggacatacagggccagcaggccgctgccgaacagcagcaggtccgggatggaagggaacatgtgatagacggtgcacatcaccgcagggatgcccagcatccaggcgatggccaggatgctgcccagccggcccgtgcggtggatggagcggtcgtagctgtcagactgcttcatgtgagaacgagcctccttttaaaatatctgttccagcaggacggacgcggccatgctgacgatcagagagatggacatgatgaagctccccagccacttgagatgaaagcgcctcatgcacaaagcgcacagggccgccactcccatgctgatgaggaaggtcagggcgtaaactgttccggaggcaaagatcagcggcgtgaaggcggccacgatccccaggaagaagcaggagttgacgatggtgccccagtcgccccgctttttcttcagggtgctcatcccagtctggatcttttccaccgcgaagatgttgatgatgatgccggccaggatgcagatgctcattacgaacatgacagcgccgaagacggtgtggtcggcctgggcggccatctcgcctacggagccgtagcccatgccgtcggccaccatgtctgccgccatcagctcatagctcaccgagcccaccaccgacagccgataccagggccatgggatgcccagtacagtggacagggtgaacagcccgatgacgatggagacagaggggacgatggtgaagaccgccgagctgcgggccacggcgctcagcttttccttggagatcccaagctccagacaccgcctccaggacttgcgcagaaagacggcggacagccccacgatatacaggaccccggcggtgaccaggacgtagaggagcggggaatttgccacatcaaaataacccatggtgttcctcccttggcagatagccagatttttttccaaatacagctgttttgttgtaaattatactatcatggcggagccggcttgaaaaatataaaatgcatttgctttccatatcaaaaatgatataatttaacgacatgatctcgttttgtgtctccgggacaaggggagcctggcgcttctgcctgaggggacggaaaatacacacaaagatcgggagccggaaaagagagagccgggaggggatcgcattggaagaactggatctgaaatacctgcaatacgccttagccgtagttcgctatggctctgtgacccaggcggcccgggccctatacctggcccagcccaacttgagccgggccatcggggagctggagcagtccctgggctttcccctgttcctccgtaccagacagggtatgagcctgacgccccagggggagcggttcctgacggaggcggagacgctgctggaccggctttccgacctggcgcgggagtgccgtcaggagagccggcgccgggtccactttgcctgtgtcccctcctccctgtttgtcaacacggtgctggagacggcccggggcctgccggactggtccatccagtgtgaggagtactatgattgccgggagctctttgaccgggtgggaaagggggcatccctggccgcctttctcacctttggaacagagatgcgggaagagcttttcgcctactttgcccggcggaacctgcgctaccaccccctggcccagagcccggcctacggggtggtccgccggaccagcagcctctaccacccggagacggtcccgccgtccatccggtacgatgaggcccttttgatgctgaatgtgacctatttcgaccccataggggtgcattttcagccggaacgctccccgctgcccccggccaaagggatctgccacggcgtgggccgggcgggcaacctggatatgctggagtccatggaccacctggtgatgatctcctgtcacatccactccaagatcatggcgcggaatgagctggcggcggtgcccatccggcccgcgttcatggactatgaatatggcttcctgacccgggcggacgtccggctcagcctggaagagcaggcactgctggagaagattgaaggggaggtgcagcgggagttcgaggcgtgagggccagatcggtgcccggatcagatattattgaagagaggagcggcgcacttcctgtgggggaagcgcgccgctcctcttgcgtccgggaagggatgaaaggggggcatagggggcatgataccaaaagtcccgatccgttggtgagttctcatcccgtagggggctggaacggcaggggaagcgtttccccggacacacaaaacggaattggaacgtacagaagaaaggggaagagggccatgaaactgaaggatcagatcgcggtggtgaccggcgggagccgggggatcggatatgcggtggtgagagccttcctgaaggagggggcggaagtggtgctgtgcgccagccggagcgagacggcggagcgggcggtatcccagctgaaggcggagctgccggaggcccgggtatggggcatctggcccagcctggaggacccggagcaggtccggacggcctttgaccggatcggggcggagcatgggcggatcgacatcctggtcaacaacgcgggggtctcagagagcacgccctttggggcgtacaccggggagctctttgaccgggtgatggacctgaacgtaaagggaatgttccactgtgcccgtggggcggtgccctggatggagaggcagggcagaggcgtgatcttgaacacctcctccatggtgagcttctatggacagcccgccggcgtcgcctatccggtctccaagttcgcggtcaacggcttcaccctgtccctggcccgggagctggcgccgaaggggatacgggtcaatgcggtggccccgggcatcatcgagacggacatgctgcgggcagtgccgcgggaggtgctggctcctctggaggcccagatccccctggggcgtgtggggcagccgggggaggtcgcggaggccttcgtattcctggcctcggagcaggcatcctatatcaccggcgtggtcctccgggtggacggactggcccgggcctgaacagtgccgggctacggccgctttctcccagaggcactggggatgttcagctcctcgcggtatttggccacggtacggcgggagatggggcagccctgctccgtcagcagggtgcatagcttctggtcggagagaggcttggtgctgtcctcctcccgaatcaggcggcggagcagttccttggcggcacagctgccgacctcggcaccgctctccccggcggcccggcgggagagaaaatgacggaggggaaagaccccccggggacactggacatatttgtcccgaatggcgcggctgaccgtggattcatggatctccagctcttgggcgatgtcggacaggcgcaggggccgcagggcgctgggccccgatcggaagaagtcctgctggcggccggcgatagcctgggcacaccggagaagcgtggcctcccgctgaccaatggcccagagcacgttttcggcctggcggagcttcaaggtaagatattcccgcacctgggcgtcatcggactgggtcaggagactgcggtaataggagttgatctggaagtagggacggtcactgttccgcaggcgggcagtgaaatgtccgtccatctcttcaatgaaaatatccggctgaatataggagatctcgctggggagcgcgaagatggaaccgggacggggattcagctctcgaatcagccgttcggcggaccggacctcctcctgagagatggagaggcgggcggagatggcatgataatgttttttggccagctcctccaggcagtcccgaacaatggcaagggcggggccctcctcatggatgcggagcaactgaagctccagacactgggagagggaggaagcccccacacctgcgggttccagggagcgcagtagctccagagtgcgggcgagccgcctttgggagatgccagaagtccgggagagctcgtccagtgggatgcggaaatacccatcctcgtccagacaggcggacaggtagcacagaagctgcttggcagactcatccagatcgagctgctggatctggcggaagagaaaattggagagggattcctccagaccgccatccgtccccacctgggccagcgggtccaattcctcggcgtccaagcgctggtaatagcgattttgacggtcgctgtcctccagccacttcacacggcggaagagctcctgatcccggggagcttcctgctcggagcggggcggctccagatcgatgatagggttctcctgggcgagctcctgaacataagcctccaattccactgtgctcatctgaaggagcgcgaggctctggagcgtctgctgggtgagctgttgagtctgccgttggaccagttccataagggacgcctcctttttcagagctattatagcaaatatgccaaggggaaacaagataggcataaggcatgacgggaccgtacagaagcatacaccacataaaattaagaatatttttattcttttttatctgaatgaggtgcacctcatggaagtatgcatccaatgatggtaggattctgcttacagtattgtcgaaatttggagggaaatgaaatgcatgcatataccaagctggtcaaaaagtttctgaatgggtacatggccgagacacgggaacagcggggcatgtctaaggaagagatgtcggaacgcctgcgcatcgagccacgttcctatgcggatctggaaaaggagcgctactgcctgtccgcaccgtctctgatgttcttcctgctcttcctggaaagtcccggggtggaggagctgatacagaaatttcgtcagacagtggagcaggcggaccaaaatggcacagtatagaacggagatcgggacggcggaggtatgtgacatgctgtgccggctgggcgccacggcaaattacagggggttctcctacaccgcctatgcagtgctgctctgtgtccagcagcaggaccggctcctgctggtcaccaaatggctctatccggatgtggcgaagcggtatgggacaaactggaaggcggtggagcggaacatccggaccgtgatcaccgtggtgtgggagcagaatcgtgccatgctggagggactggcccgccgtccgctgcttcagcgcccctgcgcggcgcagttcctgtccatcctgtccaacagcctcctgtgcgagcagagggcgggaccggtgcagagctgaaaaggaacataaaaagaggcagagcggacccgggagtgcatcccggagtgccgcgccgcctgttctgttttggacggtgccgccccacgacccagggcgggggcaggcggagatctggagggagaggaagttcagataacgcccttttcccgccatgcggagatctcctccggtgtaaagccgagggactggtagacctcatcgttgtgctcgcccagcaggggagcgcagcccctcacataggggttcgtctctgacatcttgacggcctgattcgtgatcctgacaggacccagctgggggtgggtgacctctgtgtacatgcttcgctcatccctgaaatgggggtcattggccacatcggccactgtcatgaccggcgccgccgcgattttggcctctaccagccgctccagaagcacgtttttttcgaattttgaggtctcctccgcgatcatggggtccagcagccgcggtttttgacgcggtcctccacacgctggaactccggcatgtcgatccactcgtcatgccccagaatgtgggcgaatttcggccaggcgctggcttgtccggcgctgatcatcaccttttctccgcttttggtgggataggtgtttccaggggcactggcctcgaaaaagtttcccagctggtctatgacgccggagcggaaattttcgatcagaacgcagcgtttcaaaatgattgatttgcgatacatgatggcgtatgacgaaactgcatttttcaatccccacgcaatgaaaaccctggactgatgatttacgcaaaattagaataagaatagaaggcccgccgctgcgaatttgtcgcagcggcgggccttttgcgggggaaagggccccggaggcgctggaaaggcgccgccggagccgggttccagccagatcaggggattatcgtgcgctgcgcagggcgtcccggaccaggtcagcataggtgcgcatgtcagtgatctggatccaccgctccagactgccgctccagcggtaggtgtggcagttggtggcctcctgcacgtcttcatagtaccaggcgtcctccgggttgtccggccagtggatcatgtcgtccagcatgtgatcggtgtcgggggcgcggtccagcacctcattgatgagggccatgacctcagcgcgggtgatgctccggtcggggccgtaggtgccgtcgggataaccggcgatccagccctcagcggcggcgcggttgatgtactcccgggcccagtggccggagatatcgctgaacttgtccgggccggagtaccgggcgtcggagaactgggcggccaccacagcgaactcggcacgggtgatgtaggcgccggggtcaaagtcgccgccggtgcggccggtcatgatgccgccgttgttcagggtggtgatggagtagaaggaccagcggctggactccacatcagggaaggggttccgctcggtaatgtagtccgcccgggacgcgtcggtaagcaggcggaagaagatggtggccacttcctcacgggtgatggggtcgttgggctgcacggtgccgtcggggtagccggagacgtaggcgaagtggtcctccttgttcagctgaggtgttccgccggagccgccgtgcccgcggtcgtcgtcgtcatcgtcatcatcgtcatcatcccggtcgtcatcgtcatcctcatcctcccagaacagggcgaagggggagaaggagtccacagtgaagcggatgccttcatccgtggccaccagggtgccgtcctcagtggagtagagctccatggtgtagttgccttgctccaggtcggtgttgctgttgcggtccaggcccgcatagtggaccagctggaactcgctgttccgatccgttccatcggggtagggccagtagagggtgatctccccgtcggtggtgacataggcgttgccgttgctggtgtccaccaggtccaggtagcgcagatccgcactgtggtcctcggtgatggagttgaatccatccaccgcgctgttgtgcagggtattgccctggtcggggacgatgctgtccaccagcagatgcacagcatcaggatcagcgacctccagcctgctctcattgatgtagagagcggcgtctgcggggatatgggcggtgatgctgttcacctcattggtggggggctcattgaccacaggggtggtggcggtgtcgagatcggtcacgccccggatggtcagcgtaccggatcccaccgccgcgctgtactgctccgtgtctgcgcctacagtaagctcggccttgacccgctgctgctccagatctccggcatagatggtcatgtcatactgccggaacacgctgttcacctggacagtaaagtcgtcactggtcatgaaggaatcagggtcgtcctgatcggtgaactggaggcggatggggacctcgccattgggggtctcagcgggcaggatgcggtagatgtagcggtcataggccatgctggtgttgccgggattgttgtcgtaccgctccagcttccagatccgctgttctccgccgaagttgtaagtaaaggtcagatatttggacaggtccaccacctgctgtccattttcattggtgacaacatcggcgggatctgcgtgtttgatcagccgctcattcaaatcactgggcagggtgatgtagaagcctggcacgggcagtccgttgtcggtggcgccgatctcgtttccgctgccgttgaccacgctctcatagctgctgccgccggtgtagatggtgatatcggcgggctggatcatgatctgccgggcgtcgggggtaccgtcgccgttccggtcataggcccacacggcgtagaccgtggccaccgccgggatgttgacttcggataccagagtgggcagctgttcgcccgcgtcatagatcttctcatggttgtcggtggtggtccagcccaggaagaggaccgctgtaccctcggtgtcagtgtgggtgggggcggtgtagtcatcttcttcccccagctcataaccagtctgctgggccaggtccgggactacgaatgtggtctccccggcgatgcggccgccgttggcgtcataggtcagggagtaagcggtcaccggcaccggatcagtcgtatctgtaactgcgtcctcgatctcatctgcggtcacggcagcggtattcgtcacgcctgccgccacgtctgtctgcgccgcggtataggcataggtgatgatgaccttgtcgcccactccaatgctggagatggtgtagctgctgtcgctgagggtatgatcgatgtcccctacccggatcaccgtgccggcgctccacagggtgtctttaatcgtcacatcagtcaggggcgcattgccggtattgcgcactgtgatcgtgtagtggatctgctctcccacacggacagatgcctcctgagctgttttctccaccgtcatggcgggtgccgccgcagtaagtctgtaggtgtaggtggtgctggtccccgccgtcaatgccgccccggccacgggggactcatcatcccacgcgccgctcaggatgtgcgctgcatcaggctcaacttttgtggtgtcaggaatattcgtcaaagtcggcgcggggctgacctcgacccattggtcagaggtctcatcatattccgacaaatgatagacctgttcaatttccgtgcttccgtttgcccaggtgccccccacgacctgatagatcacttgggcctggtactgatccggggtaccgtcgccgccatcttcgccgccgactttgtccacggcgtaatacagcttcagcgtcacgatatcttccggcttctcaattttggtcagcgtaccggtcgtattggagagcgcagggtccagacagtacccctcatacacttttggggtggccgttacctctgccccgatcgccccggagaagcgctccgtctccgtcgcggacacaggataagttccatcgtcgtttgccttgtagtgctccacgacatacagaacattgccggggacaatgggggtggtgcttttggcaaaggtataggtgtacgtcacatcatcggtcccggaaactgtggcaggaggcgtggtatcccagccgccctgcgttccgtccgtgccaccatagccagcgtccggcttcattccggtgggggctgtcaggtaggcgctgccgttcatgtcccacttgccgtccttcatcagcgtcacataggtgactttggcggcgctggtgccatcctcccaggtcccgtttaccacctggaaagtcactttcttctggtacttgtccgggacaccgtcgccgccgccattctcgccgccgacttcatccaggctgtaaaccgccgtgatctccacattgccggtgagcgtgccggaggtcgcccccttcaccgtgtctttggcatagctctgacctttatatgtgatcgagtcagggatctggtcgctcacatcatagggagaccccttggacatctcttcgctgacataagaagtttggatctccgtttgatccgcatcatccatcacatacttgacggtcaccgtgtactggtcctcacaggccacctggaacgtgaccgcctctttgctcccgcttttcagcttccagccgttgtgatacacataagtgactgtggccgtatctttcgcgggggtgtgagtcgcactggtggtctcattatacgccgtcacgaagcgctcagaggaaatggtgaccgtatattccagatggcggtccaccacccgggaggatgtggtataatcccctgccgtcaaggtcatcggctgagaacctgcatggcccgcggcctggttggtgcagctcacggtgactttgatgctgttcagaaattcaggcgtcccggcctccacccacttggcggtcagggtcagatcgctgccgcggatgacgacctttccgcctgcgtccaccttggagccgtcctcatatcctgttccggaaatggtccagccgtcgaagacatagcccgtagccagcgcggcctggaccgcctcgtcagaaggaatggcggcttggacttcctcattgcgcttcagaccggtctgagtttcaggaacatcgtactcagtcagtgcctcgctttggtcgccccaatcatactggatctgataggtgttctcatcttcctttaactccagcagcagatagaagggataaatggtgttcccgcctagatagctgttgctccagttggcttcactaggttttgaggtgggatagtttcggcctaagccgccgacattgcgccaatgatcaaaatcattttcgtcaatggaaacgtgcgttacagcggaataatccccgttttcgtccggctcgatggtgacagcgtcaccatattcgaccacaccgcacccggtatagtttccgcacaccagacggtaggaggagagatagtagccctccgccacccggatgtccaggtcgctgcggatcagctggcccgcgttggccgcctccgaatcatccagggcatcctgaggggatacttctttccctgtataagtgacatccttcgccccggcggacaccgttaccagagaggggtccgtgatctcttcattccccaatccgtaatattcgtcaaagctccaatacacgggccaccagttgcgccactggtccctctggttattctcatcggtcttttcctccagcgtccaggtataggcccactggtagcaggcatcaccatgctggtgctcctccttgctgcaggtcaatgtgtaacatccggttttgagagaacattcgtgcctgcactcggtggggccttcggttttgtcaattacttggtatccccatgcccaatctaggatgctgaaggagtgccacgtgcaccctgtatcgtctttatggaacccgagcctattataatggtccggattgtcctccttcgtacacttcacccactgtgtgggatagcagtcgtcattgtgctcatgtacacagtcatggctgtagcagctgtccagagagtgggcgtgttcctcctctttgcaggtaagatctccccgctcagcgtcgggccctacccactctgtcccatccggaatgttttccggcggcttttgatcggggtcggtcgtttcaaacgtatctcctatctcatactctgaccctcccggcgccgcaaaggcggacaccggaagcagggacagcaccatgcacagggtcagcaatacggccaagaatcgctttttcatgtcatttctttcctccttagtagctgatattcatgccagcgcaatcgagagctggggggtgtggtcacatcatccccaccccctttccggcatcccagcccacggagaactgttccgcctccatcatctggtcgaaggcctggaccaccagctggtccacactgacccggatggcatcctgggtctcctgccacagccggcgcagacagcgtgggttccctttttcctccggcacccgggcgtcccggcacagggaccggatctcgcccgtcacctgggtccgccgtatgggctgcccgttccggctgcggaacaccggtcctgcggtgatgccctgccgggccgcatagccccgcagctcctccgccagcggcggcggcagacgcacggggctgggtccccgcccgtccagcgcctccgccgtcagccggggcagctcccccaccgacaggcccgtgcttccgaataccttcaccagcaggtagagccgctccttctccagaacccgggcggtggacagcagacgcagatactccccgcgggtcagctccggccgctccacctccgccgggggcgggagggcggcggtggcctggagttcccggtggcccagataggtcatcaggccgttggccgccgccagccgcacattgatagtccggggaagatacccctggtcctccagcgtctcccgccagcggtccagcgtcccgcggcctacccgcttgtccggcggcagcgaccggtacagcccatagatgctccgccggtacgccgccagggtgtctgcgctccggccctgctggcgcagggtgtccagataggcgtccatggcctccggcgtgaggcatacctcccctgccggggcctcctgttccatcaccagttccatgccgttctcccctctcgccccccagttgtaggcaaaatcaatattttgccgcgttctatcccggggaaggagctgttcgggcagaaaaaaagagcgccggcggcgctcctgagggaaaaagggcgtgaagatcgagccgtatgagcaatttgggctcatatggctggtctttgcgcaaatttagcagctccagcttgaattttccatcggcctgtgctataatctaccagaaatctatgtagcctcctgcggcctttcctggtcgctggatgcaaaatattgattttgtctagcagacgaggcgcaggcggtccagatcccggcggtgctgggcaccggtggagatgagatagatgcgggtggtctcaatgctggagtgccccaggacatcggccagcttggccacgtcccgggtggcctgatagaaggtgcgcgcaaagagatggcgcaggttgtgagggaagaccttggtgggggccaccccggctcggaggcacaggcgcttcatctccgcccagatctgccgcctggacagaggcttgccgcttttggtgaggaagatctcgccggaagcggttttttgctgtctggcgtacttgagcagcttgcggcacagcttgccggggaggaggatggtgcggaccttgcccttgagggcgatatccgcctgaccggaacgggcggcctccacagtgatatagcgcacctcgctgactcggatgccggcggcgcagatggtctccatgaccagggccaggcggtcccggcccaaggtgcgggcggtgtccagcaggcgctggtactcctggcggctcagctcccgctcctcgctctgaaagagtctgcgctgcacccgcagggcgcggacacggcagtcctccaggccgatgaaacggagaaaggtgttgagggcggccagcatggagttgatggtggcggggcggtagccggagcggaccaagtgggccttccagcccgtgaccgcctcccggttcaccggcgcccccgccagccactccagaaaggcccctgcgtcccgcaggtacttctccactgtccccgcgctccgctcctcctccgccagcctccgggcaaaggcagacagatgttcctggggcacatggtgatctttcatacaaaaactccccttttcttccagtgtggtactattttaccggaaacggggggcgtttatccgaaacctaggggaagaaaaggaggaaggctgttcaatttgcagcccaacctccggcaccggacacccctttttatatataaggtatgaaaatgccgggcgggggagaaaaatcgttgacttgaatatcctgggagggtatgctatactcaactttgtatgaatccacggagggcccgggccgcacagcatactgacagggggaactgccggtatgctgttctgcatcgggacaggggagccgggggctccggccccggcagaagggggaggcagcgtgctgcgcctgttgtccaatcagaattttaaccctacccgcctgatcgtggtgagcttcggggccatcatcctgctggggacttttctgctccacctgcctatctccgcccgggacgggcagttcaccccctggctgacctgcctgttcaccgccacctccgccacctgcgtcaccggtctggtcctggtggacagcgcgctccactggactcccttcggtcagggggtgatcctggccatgatccagctgggcgggctgggatttgtctcattgatcagcctgatccctctgctgctgcggcggcgcatcggcctgtcccagcggctggccatcgcctccgcatttaatctgaatgggatgtccggggtagtgcgggtggtgcgccacgccctcatgggtacctttctgctggagggctgtggtgcgatcctgctggctacccgcttcgtcccgctcttcggctgggggcgggggctgtggtactccatctttcacagcgtgtccgctttctgcaatgccggattcgacctgatgggggagcacaccggggccttctccagccttgcgggcttccgggaggacccggtggtgctgggcaccatcgggtgcctgatcgtgctgggcggcctgggcttttttgtttgggaggactgcctggagcatcggagctggcagcggctgtccttctactcgagaatggtgcttgccgtcaccggggcgctgatcctggggggctggctgttctttctgggggcagagtggaacaatctggagaccctgggtggtatgacggcgggagagaaggtgggcaatgccctctttcagtcggtgaccctgcgcacagcagggtacagcgttctggaccagggggccctgcgggaaggggcggctgccctgtccgtggtgctgatgctgatcgggggctcctccggctccaccgccggcggcatcaagacggccaccgccggcgtgctgctgatctcactgtgggcgggcctgcgggggagagaccaggtggtgctccggcggaggaccatcccccaggcccgggtgctcaatgccatgaccctgaccctggtggtgacctgcctgttcctggccgggtccatcgccctgacattggcggacggggtcccctacctggctgccgccttcgaagtggcctcggccatggggaccgtggggctgaccatggggatcaccaccggcttgtccccgctgagccagggaatcatcatcgcgatgatgttcctgggccgggtgggcgtgctgtccttctccattgcgttcctgatccgggaccggggagagaataagatccgctaccccagtgtggatgtgatgatcggctgaaggagatgtctatgaaaagctttttggtgatcggactgggcagattcggcacatcgctggcctgtgagctgtgtgccctgggccacgaagtgatggcggtggatctgcgggaggagcgggtccaggaggtggcgggctctgtgacccacgccgccgccggagacgcccgggacccggaggtcctccgggccctgggagccaggaactttgactgtgctgtggtgtccgcaggggacgacgtgggcaccagcgccctcatcgtcctcaacctgaaggagctgggagtgccccaggtggtgggcaaggcccgcagcgccgtccaccaccgggtgctggagaagatcggcgccgaccgggtggtctttccggagcaggagatggccctgcgcctggcccggaacctggccaacggggacatcctcaactttatcgagctgtcggaggagtactccatcatggagtgccgctgtccccgccagtggcaggggaagagcatccgggaactggacgtgcgggccagacaccgcctgaacatcatcgctatccgccgggggggcggcatgaccatctcccccggaggtgagtacgcccttcaggaggaggacgagctggtggtgctgggacggaacgaggatatcagagaggtggagcggctgtgagagaggagtggatcaccagccggaagaaccccctcctggtccagatccgccgcctggcctccagccgcggcgcccggcgctcagcggggatgttcctgggggacggcgtcaagctgctggaggaggccttgaagtggggagcgcccctggagacggtggtgtactcggaggggctggacgggccggagctcccgccggaggtgcggacggtccgggtgccggaggatgtgatggcctccatctcccccatggagtccccccagggggcgctgttcctgtgccggatgtgggacaccgccccgccgccccgcctggagggcgggcgctatctggtgctggacggtctccaggacccggggaacgtaggcactatctggcgcaccgccgatgccctggaggcggacggcctgctcctggtccacggatgtgcggaccccttcggccccaaggtggtgcgggccaccatgggggcctgtttccggctcccggtgtgggagaccggcccggagaggctggcggacctgctggagcggtcaggactggcgctgtacgccaccgccctgcgggaggatacggaggatatcaaaacggcggacctgagccggtccgccgtggtgatcgggagcgaggggcgcggggtctcgccggaactgctcgctatgagccagcgggccctgaagatccctatgcgggagcggtgtgagtccctgaacgccgccgcggccgccgcggtggtgctctgggagatgggccgctaatcccggcggggccggtgtcctgcgtccagctttcggtaggcccgctggatgatgaccagtgagacggccagacacagggcgaacagggcataggccggaacatagctgtggaagcggtcagccagcaggcccgggatggggccgaagaggagcatcccaagagcgtaggacacagtgagggagcgcaccgcaccctcgtactgggcgtccccgaacaggtcggcggaccagatggcaaaggtcaccgccgagatgggcaggcccaggccgaacagggtcatggccgcgaaagcggggagcatcccacccaggtgggccagacagcacaggagcagtccggccagaaagaccagatggacgtaccagttgcccgcccggctgccaaagcggtcatagatctggccgcagaggatcttggatacgcagatgaccagccccaggtaagagatgagcagagcggcggaggcgctgtcatagccggcggtggtgtagagcaccgtgaggtgggagaaaccgggcccgccggggccgccgatgagaaagacagccagcagcagggacagccggagggcgggagtcatgcccgccggcgcggggcggggcggcggcgccggagtctccggaccgcccaggtggtagggctccaggcccaggtcgccggggacgtcccggaccaggagaaagaccagcagccccagcaccagcaccgccagcccctccagcagaaaggcggcgcgcatgccgtgggcctggatgatcccggtgatcagtgtggggacaaagatggtggacacgccgctgcccgcggcggccagccccagagccaggccccgccggtcccggaaccagtggcccaccgcgagagagagggggaccatgccgccgtagccgtaggccagaccggtgagggcccccgcggcacagtagagggggaaactgtcggccaggccgaagcagaagcaggacagggccagcagcactacccccagggtcatcaccagacgcagtccgatccgggcgcacagctgattcactgtcagcatggcggccagggtgaagaggctgcgcgtggtggtgatccaggagccctgggcgttggaaaagccgttgagctggatgatgtagggctgatacacggagaacacgttgatgcccatccccatgaccgcgaacagggacagggcgccgcccagacagatgatccaggcgtaatggggccgccgaagggagaccatgggaacagcacctccttattcctatctcctaccatacaggaggcggggacgtttgtaaagggggattttaccggaggagcgggacggagggaagaaaattggcgacgctgaaatactggctgtggctcaccggccgcagggggctggggaatgccggcgccctgcgggtgctggaccactttgtcaccccggagcggaccttctacgccgacccggaggagtacgccctggtggaggacctgactccggcggcccggcgcgccctgctggacaaggacaccggcggggcggagcgcatcctggaggactgcgcccgcctggacctgcggatcatgaccctccaggacgccgactacccggagcggctgcggcagctgcccgacccgcctctggcgctgtacatccggggccggaccttcgccttcgacgaggaggcggcggtgtgcatggtgggggcacgggaggccaccccctatgggatcggctcggcggggcggctcggcctggagctggcccggggcggggccctggtggtgtctggcatggcccagggcatcgatacggccagcgtccagggcgctttgaagggcggcggaccggtggtgtcggtgctggggggcggagtggatgtaccctacccccgggagaaccgctggctctatgaggacgtggccgccgccggggccctcatctccgagtacccgccggggacggagcaccggggggagcacttcccggtgcgcaaccgcatcctcagcggcctgtgcctgggggtagtggcggtggaatgccgccctcacagcggcactatgatcacggtggaccgggcgctggagcagaaccgggacctgtttgccgtgccagggaacatcgacgcccccatgagccagggccccaacctgctgatccagcagggggccaagctggtgaccagcgggcgggacatcctggaggaatactgggaccgattcccggccaagctgtctccgggagagcccctcagcccggcggcggccgccgcccggctggagacagcggcctgtccggcccctgccccggcggagcgggaggaggcaccggcggcacccgggcgggagcgcatccccgccgcggagcagcgggaccgctttaccgacgacgagctggcgctgatcgccgccttgggcggacggcgccgctccgccgacgagctggtggaggccgcacagatcccggcccgccgggtgctctctgccctgaccatgctccaggtgcagggggcggtggaagaggggccggaccgccgcttctccgccctggtggagctggaggaatagacccttgacagacgcgcgcggggacgctccgcagctgcgttttgacttatacttttttcttatcttcgattttggaggttatttgatggcagcaaagaccgatttggtgatcgtagagtctccgtccaaggccaagaccattgggaagtacctggggccgggctatgaggtgaaggcgtccatgggccacgtccgggacctgcctaagagcaagatcggcgtggacatcgagggaggctttgtcccccagtaccagcccatcaagggcaaagaggacgtgatcagcgacctgaagaaggcagccaagaagagcggccgggtctatctggccaccgacccggaccgggagggggaggccatctcctggcatctgaaggagctgctggatatcccggacgacaagacctatcgggtcaccttcaacgagatcaccaagaaggtggtcaacgactctattgccgccccccgggccatcgaccagaacctggtggacgcccagcaggcgcggcgcatcctggaccgcatcgtgggctatgaactctcccccctgctgtggcggaagatccggcggggcctgtccgccgggcgggtccagtcggtggccacccggctggtggcggagcgggaggaggagatccgggcctttgtcccccaggagtactggaccatcgaggcggagctggagcgggtgcgccccaatctggggggcttcaaggcccagttctacggccgggagaagaagatggagctccgcagccgggaggaggcggaggaggtggtccgggcggtgtccgccgcccccttctccgtgaccagggtgaagcggcaggacaagctgcgcaatccggcgccccccttcacgacctccaccctccagcaggaggccagccgcaagctgaacatgacccccgcccgcaccatgtccatcgcccagcagctctatgagggcgtggacatcaccggggagggcaccgtgggcctgatcacctatatgcgtactgactctctgcgcctgtccgaggaggccatcgccgccgccaagggctttatcgagagccgctacggcaaggagtactaccccgcccaggcccgacgctacaagaccaagggcaatgcccaggacgcccacgaggccatccgtccctccgacgtgaccctcaccccggaggacgtgaagaaggacctgacctcggagcagtaccgcctctaccggctgatctggggccggttcctggcctgccagatggcaagcgcggtctatgacagcgtatccatcgaggcccagtccgccggctacaccttccgggccagccactcggagctgaaattctccggctttaccgccgtgtatgaggagggacgggacgaggacgacgaggcaccccagtcccccctccccgacctgcgggagggggagccgctggaccggaaggggctgaagcaggaccagcacttcacccagccccccacccggtacaccgaggccaccctcatcaaggctctggaagagaagggtatcggacgcccctccacctacgcccccaccatctccaccatcctgaaccgggagtacgtggtgaaggaggggaagtacctccgcaccacccctctgggcgaggtggtcaccggcctgatgaaggacaaattcaacgatatcgtggactacgccttcaccgcccagatggaggagcggctggacaaggtggaggagggagaggccaactggaagaaggtgctctctgacttctacggcggctttgaggcagagctccaccaggcggagcaggacctggacggggagcgcatcaaggtgccagacgaggtttcggaggagatctgtccccagtgcgggcggaacctggtcatcaagtccggccggttcggccgcttcctggcctgtcccggctggccggagtgcgacttcaccatgccgctggtggtggagatgccgggcaagtgccccaagtgcggagggcgtctgttcaagcgcacgggcaagagcaaaaagaccaacaagcagtacacctattactgctgtgagcacctcaacagcaaggacgagtccaagcgatgcgacttcatgacctgggacgtcccggtgaaggacaactgtcccgtctgcggctggaccatgttcaagaaggcgggccggggggcgaaaaagcccttctgcatcaacgaggcatgctccaacttcaccccggaggagaagcggggcggctggcggaaaaagacggaggagagcggggaggaggcccctgcccaggaggcggcggaggaaggcaagaccgccgagaagaaggctccggccgccaaaaagaccaccgcgaaggcggcggccaagaagcctgccgccaaagccgcggcctcaaaaaaggcatccgcggcgaaaaagcccacggctaagaagaccgccgggaaaaagaccgccgccaagaagacggaggagggatgaccggcgggggctgaacgctcaggcggtcagccttccgttcagctcccggcacaggtccacggtggccaggaacatggcctccagcaggcaggagttctcctgaaaggcggccttttcatagcggtcgaacagggtgcgcccctcttcatccagatgatcgaggatctccaggggccagatatcccgccgggtgctgctgatccggtaatcggagtccacagccaggtaattttgaagggtaactttgttgatgtactcaaagagagcttccataagatcggtcattgtgatcaactccaaacacgaataatttatacatgttataacacgtatagattattcgtgtcaagaggaagtaaagagatgtatggagaacgattaaaatttttgagaaaagaacggaagattccgcagaaagaccttgcggagctgctggggatcagcatccgtggatatcagttctacgagagcgagaacaatgagcccaatattgccgcattggtgacattggcggatttttacggggtgaccatcgactttctggttgggcgcacggacgaggaaacataacggtactgcgtatagggcgcagcggcccggcacaccactgcccaaagcctttcccctcgggaaagaggtgcccagcggatgccgcatccccccaaaagccttcccccctcctggggggaaggtgtcgcggcgtatgccgcgacggatgagggggcttccttcccacgtcccgcatctatagggcgggcaggtctaggacccgtctctacgcaaaggccgaagggaacccgcaggggcggcttccagccgcccgaaaagcctccccccctcctggggggaaggtgtcacggcgtatgccgcgacggatgagggggcttccgtcccacgtcccgcatctatagggcgggcaggtctaggacccgtccctgcacagagacgaggaccgctcatggggacggcgggcgcgcaaaggccgaagggaacccgcaggggcggcttccagccgtccgaaaagcattcccccggggggaaggtgtcgcggcgtatgccgcgacggatgagggggcttccgtcccccgtcctgtatctatggggcgggcaggtctaggacccgtccctgtacagagacgaggaccgctcatggggacggcgggcgcgcaaaggccgaagggaacccgcaggggcggcttccagccgcccgaaaagccttccccctcctggggggaaggtgtcgcggcgtatgccgcgacggatgagagggcggtcctccgcccgcctctggccgcagggcggaacccccaaaacacttcatcgccgccctccggcagggcgggcggatctcgaggaggagagctatggaaccagtgaagatcatcggcgccggtctggcgggctgcgaggcggcctggcagctggcccagcggggcatcccggtggagctgcacgagatgaagccggagaagatgacccccgcccaccacagcccggagtttgcggagctggtgtgctccaactccctgcgctccgaccagctggagaacgcggtgggactgctgaaggaggagctgcgccgctgcggctctctcatcatgtcctgtgcggatgcccaccgggtggaggcggggggcgccctggcggtggaccgccgcgccttctcacaggcagtgacccaggccatccgctcccaccccgccgtcacggtggtggagggggaggtggagcgcattccggaggaggggcaggtcatcgtcgccgccggcccgctggcctccgacgccctgacggaggagatctcccgcctgttcccggacagccgctacctgaatttcttcgacgcggcggcccccctggtcacctttgagagcgtgaacatggagcgggcctggtttgcctcccggtacgaccgggggacaccggattacatcaactgtcccatggaggaggaggagtaccaggccttctgggaggccctcaccaccgcccaggaggcggaggtccacggctttgaggactccggcgtctttgaggggtgcatgcctgtggaggtaatggcccgccgggggcggcacaccctgtgttacggcccgctgaagccggtgggcctgaaggaccccaggacggggcgggagccctttgcggtggtccagctccgccgggacaacgctcagggctccatctataatatcgtgggcttccagacccacctgaaatggccggagcagaagcgggtgttctccatgatccccgggctggagcgggcggagttcgtccgctatggggtgatgcaccggaacacctatctggactccccccgcctgctggaccggtactaccgggtgcgggggcaggagcggatcatgttcgcgggacagatcaccggcgtggagggatatgtggagtccaccgcctccggcgcgctggcggctatggagctggcccggcggctggaggggaaggagcccatcaatttcccccgggagaccgccatgggcgcaatggccctttacatcagcgaccagagtgtggtaaactttcaaccgatgaatgtgaatttcggcctgatcccgcccctgggctaccgggtcaagggcaagcgcaacaagaacgccgagctgtccaagcgggcgctggaggcgctgggggagctggagctctcctgacgggaccgcttgagacctcgggacgggaccggagctgaggaagaggccggttcagacccttccgtcccctagggccagccgaagtcccagacggaggccgtgggcgaaggagaccaaatcgctctggtcagtgaaacgtaggacggcgtcccagagaaggtcccgggcctctgggtcacggatgacctccaggcggtccagacagctggagagggcctgacggcggcgctcatactctgggtcgtcctcatacatcagccgcccagagtctacctcggaaaaatagagttcttggagctggacttccattgcaacatcaccacactaaaaggatgtatttaatatatattcttttagtgtggttgtcaagggggaaatatgtttcataaagatctatatgggctccgcttgaaaaaattgagaaatctgtctggggagagacaggcagatttggcggcagttttgggcgtgaagcccaatcagatcatggaaatggagaacgggcgaaagaccaccacattggaaaagctggctctgatttgtcggcattacaacgtctcggcggactatctgctggggctgaccgacgagcccaggccgctggtacagcaagagaaagaaggttaatggaatgaagatcatagtggacgccatgggaggagacaacgcgccccaggctccggtgatgggggccgtccaggccaaccgggagtatggtgtggatatcatcctggtggggcggggggaggccatcctgaaggtgctggaggaaaacggcatccaggagctgcccgccggcgtggagatcgcccacgccagcgaggtggtggagatgtgcgacaacccggccaccgccttccgggagaagaaggactcctccctgacggtggggctcaacctgctcaaggacggcagcggagacgcctttgtctccgccggctccaccggcgccctgctggccgccgccaccctgctggtcaagcgcatccggggcatccgccgggccgccctggcccctgtggtgcccacggggaacggcggcgcggtgctcatcgactgcggcgccaacgccgagtgtccccctgagtatctgatgcagttcgcctatatgggctcctactacgccgagcacgtgctgggccgcccggagccccgggtgggcctgctgaacatcggcgtggagccctccaagggcactgagctgcagcgcaccgtctaccccatgctccagaaggctgaccaggagggccgcatccgctttgtgggcaacatcgaggcccgggaggccgtggagggcagcgtggacgtcatcgtggccgacggctactccggaaatatcttcctcaagaccatggagggcaccggtctcttcctggcccgggagatcaagaagatattcaagcagaacctgctgaccaagctggcggcggtgatggtctccggcgggctcaagcggttcaagaagctgatggattccagcgaggtgggcggcaccgctctggtgggcatctccaagaccgtcatcaaggcccacggctcctccaacgcctacgccttccagaacgccatccgccaggccagccagtccgtctcctccggtctgatcgagaacatcaccgccaacatcgacctgatgcgtctggacgcgccggaaaaggaatgacgtttttcgaaaaaatggaaactccctattgacagccaccctgtttgtgcatatagtagggacagaaaaagtgctggagcacagcaaaaggagcaggctagttatgatttttgaaaagctgagtgcactgatcgccgagcagttcaacgtggaccccgacaccatcaccatggacacctcctttgaggacgacctgaacgcggattccgtggacatcgtggatctctccatggccctggaggaggaattcggcattgaggagctgggggaggcggaggctacctccatcaccaccgtgggcgacctggtccgcctgatccagagcaagatcgactaaaggcacaaaagacaagattcaaagctccgccggagaggcggagctttgccttagcgggaccaagaccggcgcgggccagccccgcgccccgggaggagacacaggaacatgaccacattagaggaaaagctgggctacacctttcagagcccggaactgctggaaaacgcgctgacccacagctcctgcgccaacgagagccggggaaagctgcagagcaacgaacggctggaatttctgggcgactccattctggggatggtggtggcagaccacctgtaccggaaccacccggacctgccggagggggagctgacccgcacccgctccgccctggtgtgcgaggagagcctggtggaggtggcccaggccctggggctgggagagtatctgaagctgggcaagggggaggaggccggcggcggccgccaccggccctccatccaggcagacgccgtagaggcggtgctggctgcggtctatctggacggcggcatcggctcggcccggaagatcatacagaaattcatcctcagccgggaggtggccggcctgaccaagccccgggactataagaccgccctccaggagctggtccagcgggagagcgggcaggtgctggcctaccagctggtgggcgaggagggtccggaccacgacaagcgcttttttgtggaggtggacctgaacggcaccccggtgggcagcgggcagggccgcagcaaaaaggaggccgagcagatggccgccaaggcggctatcgggaagctgggcggctgaagcggccgctccccggaaaagtgaagccccgcccggctcgggcgtcagggaccgccccggccgcaggccggggcggtttttacgtgctccccaacgccttcccactgaggggaaggtgtcacggcgcaggccgtgacggatgagggggcgtccttccgtacggcaaaaatccacaggataggcggggcatgatcttcttactccggactccggggcggagtcccctgggaagggcacggaaatatatcctgtcccgctctcgacgggggaaataaaaattttttcaaaaaccattgacaaacgtggttagcatatgctaatataaacacggttagaggaaactaactggccgggattctcctcacacctccctgctttcttccccacacttgtttcggcctgaatcctccagccaccagaatccccgaatggacaggcatcccgtttgggaaacagcccacagccgcgatcacacgcgcggctgtgggcctcctcctttttggggggaggggcaactgggatgttgacgggggcgcctgggcatgatatagtggaaaaaaacaggcgggatctttgccatggaacagatcctgttccgcagggaggggcacctttgaacaaaaatctgctgagaagcatccttttgatcatcacctactcggtggtgctggtgctggtactggtgaagatcgacctgatatgggccgtggcggctcagatcctgggggcgctgaagcccctgttcctcgggttcgccatcgcattcgtgctcaaccggccctgcaccttctttttccgactgtaccacggggggctggcggggcggaagctggaccgcttcagccgtccgctggcagtgctgtccgcctatgtggctctggtggtggtggtcaccgccctgttctcctttgtgctcccccaggtggcggacagcatccgtctgttcgtcagcagtctgtccggctatatggccaacctccaggccctggcggacgaggtgttcgccctgttcgaccgggagggcgtggatttctccagcctgaacgaatatctgcggcgggtgctggagggggtgctgaacacagccaccaacgcggcctcccatgtgctggtcatcaccagcggggtcatctccatgggggtgacgctggtgctggccatcgtgttctccgtctacatgctctccgggcgggagaagctgctctcgcagtgccgccgggtgatgcgggcctacctgcccggctcctgggcggaccgggtgcagagcgtggtccagctctccgcggacaccttcaccaattttgtctcgggccagctcaccgaggcctgcatcctgggggtgctgtgcgccctggggatgctgttcatccagtccgactacgccgccttggtgggggtgatcgtgggcaccacggccctgatcccggtgatgggggcttatatcggggcggttctgcccgcctttctgctgctgatggtggacccatggcgtgcattggcgtttctggtattcctgggcatcctccagcagatcgagggcaatgtgatctatcccagagtggtgggcacctccatcggcctgcccggtatctgggtgctggctgcggtgacggtgggcggcggcctgttcggcctgctgggcgtgctgctcagcgtgccggcggcgtcggtgctgtacaccctgttgaagcgggatgtgcaccgccggctggaggagaaaatgcccgccccggagcaggcagaagagggaacagaataggcacaggggccggcgggatctccgccggccccttctgacttgcggctgcccggcctccggggtggtcctcccctcccggcccggtgccgggatgcggtccgatgggacatgggtccccctgagcgagaaatcgagccacagggacgcaggccgaaaagttctttcagattttgaaaaaagaatacccaagcgcaaagatttatggtatgatgacaaaagggtgattttccagccggcagagccggccgagaggagggaacggcacatgagaagacatatcgggctggcgctgctgacggcggcgctgtctgtcctgctgaccggctgcctgttccgctccacagaggatctgtacgcccttccggagcgctttccaggctatgaggacctgaccggcaagcgcagtgagatccaggccggcctggagatggagtatgggaccacggtggagactgcggtcatctactccggcgacaacacctctgtgatccagtttcaggatatggacggcgacggctcccaggagactgcggtcatctccttccgcatcccgggggcggagcgctccctgcgggtctatttcctcaccacccagggagacaccgagcgctatgagatcagcgcggtggtggagggggacggcaccggaatcaacgccatcgattatgtggagctcagcggcagcggcaaaaaggaagtggtggtcagctggcgcaccatcgagggcgtcaaccagctgggcgtctactccctggacgagctggagagcaatgagaccgttccggtggcctcccagctcctgatgaccggatacagcggatacagcctgctggacatcgaccgggatacccggacggagctggcggtgatccgcctggacccggcgggcgtggacagcacggtggaggtctacggctggcagaatgggatgctggatcggctggggaccgcccggctctccgccggcatcacggccctggcctccaacggcgtgcggatcaactacctcaccggggtgatccccgccctctatatcaccagcaccctgacggacggaggacaggccactgacatcgtggccatgcgggacggctcgctggtcaacctgaccatgaaccaggagacaggcgtgagcgtggagaccatccggggctatggtgatatccgccctatggatgtgaacagcgacaccatcctggagatgccccgcccccacctgctgcccacctacggggagaacttgtccagcgacttctggctcatcgactggagccagtacgacgtgggggggagggcggccccagtctttaccacttatcacaatatgtccgatcagtggtatctgatcatcccagaggagtgggtggaccagattaccatctcccgaagcgacagcagcggcatacgtgcggtcatcttctccctctggaacgggcagaagaaggctcccaccccgtttttggccatctacaagctgaccggcatcaacagcagcagtcaggccgccaaggaggggcgctttattctggcggaggacggcgacgccatctacgcggcagaattttttgagagcggctggaactgcggattggatgaggccggcgtgcgggacagcttccgcctgatcctgagcaactgggccggagactgaccggagcgatccacaggaggaacggaaatgaaaaagatcctggtgttggaggacgaagagaatatccgcagctttgtggtcatcaacctgaagcgggcgggctacgagactgtggaggcgggcaccggagaggaggccctggcccagctgaagcagaaccctggcatcagggtggccctgctggacatcatgctgcccgatatcgacggctttgaggtgtgccggcgcatccgggccatggacaataagatcgggattatcatgctgacggcccggacccaggagatggacaaggtgaccggcctgatgaccggggcggacgactatgtgactaagcctttctccccggcggagctcaccgcccgggtggatgccctgttccgccgcactggaggggatgaggagctggaggcagatgacgaggtggtccagccccccttccggctgaatacccgcaaccggaccctggagaaaaacggacagcgggtgaagctgactcaggtggagtacggcatcgtgaagctgttcatggagaacccgggcaaggcactgtcccgggaagagatcctggacgcggtgtgggggcgggactactttggagagctgaagatcgtggatgtgaacatccgccgcctccgcatcaagatagaggacgacgccacgaacccggtttatatcaccaccgtgtggggatatgggtacaagtggggcggataagcaggctcccaggggcgtcgtccggggccccgcagagcggggcgcgcggcagcgcgtcaatgcttcgcagtgcgaagcattggcggaggggcaattcatttgccccgagcatcggaaaaaagaggggtccccaaagagcgggctctttggggagggacgccacgaacccagtctatatcaccaccgtgtggggatatgggtacaagtggggcggataaagcgaagaaaacagcggggataggcccctgaacggagaggagggatacggtggcgaagaagacagtgatccaggaccgggtgaagatccggggcatccggaagcgctggctggtgaacagcatgggcgtggtgaccctgatcctgctactggccatgggaacgctcaccttgtccctgtgggcgtactatgaggggtccatgcgggacaacctctcctcccgggcctctgacacggcccggagcttcagcgtctacacccggcgggagtaccggacggcagcccaggactatgtagcaaaatttcccgataagcagaagctggaggtgcagttcatcgagacagacggttcgctgctgtgtaccagctacggcctgaccacctcgggcacgatgccggggacgccggacatcaccggcgccatggagagcggcgatgtgaagccctggacgggacaggacccccagacaggggagcggatcatggccgtgtccgccccgatcatctaccaggggaccacagtgggcgtgatccggttcgtcacctctatggcggcggtggaccggcagctgttcctgtccatcggtgtatgcaccctgatcgggatcgccattttgactatggtgtatttctctaacctgtatttcgtgcgttccatcgtggagccgctggccagcatcaacgagacggcccgcctcattgcggacggcagctacggcatccagatcgagaagaagttcgatgacgagatcggagagctcacagacaccatcaatgacatgtcactgaagatcaagcagtcggaaaagacccaatcggagtttatttcttccgtctcccacgagctgcgcacccctctcaccgccatcaccggctgggcggagacgattcagagcggtgagctgaaggacccgggcgacgtgcgcaaagggatggacatcatcgtgtcggaggcccaccggctgaccaacatggtggaggagctgctggagttctcccgcattgaggacggccgcttcaccctgtcggtggagccgctggacctgaaagcggaactggaggacgcggtgtacacctacagggagttcttccgcaaggagggcatcgctctggagtacaccgagtgcccggaggagatgatccccatctccggagacccagggcggctgcgtcaggtgttctgcaatctgctggacaatgcggccaagcacggcggcagcggaaagcgtatcgacgtgtccatcgcccaggaggggggagagggcgtcatccgcatccgggactacggccccggcatcccgccggaggagctcccccatgtaaagtacaaattctataagggcagctcaaaagcccggggttccggcattggcctggcggtgtgtgaggagatcatcacccggcacgagggcaccctggacatcggaaacgcggagggcggcggctgcctggtgaccatccggctgccaattgaaacataagttctattcccccttgctattccggccctgatttggtagaatagcgctgagcctgtccttcaatgaaaaggagaaccaagatccatgcaagaaaagcaagaagaaacacagcagaactgtgcccggggcagctgctccaagggcttcaagaccatgtgcggcggccaggccctcatcgagggcatcatgatgcggggcccgaaaaaggagtccgtagtggtccgccgccctgacggcggactggagatccaggagagggagctcagattcatccgggaccgctatccggtgctgggctggcccctgatccggggagtagtcaacttcggcggctctatgtacagcggcgtcaaggcgctgatgtactccgcggaatttttccccgaggacggggaggcggaagaggaggagccctccaagttcgaggtatggctggagagcaggctgggcagcgagaaggcggcctcctttttcctgactctggcggtcatcttgggcgtgggcatgtccatcggcttgtttttcctcctgcccaccctgctgggcaccgccgtgaccctgttcacagactccatgctggtgcgcaacgtggcggagagcctgctgaagatcgtgatttttgtgggctatctggtactctgctcccggatgaaagacatccaccgggtgttccagtaccacggggcggaacacaagactatcttctgctatgaggcgggcctgcccctgacggtggagaacgtgcgcaggcagcccaggcaccatccccgatgcggcaccagcttcctgttcatggtgatcgccatctccatcctggtgtccaccgtggtgttcgccatctggccggtgcacaacccgatcctgcgcttcctggcccatctggccatgctgcccctgatcgtgggcatcagctacgagttcaaccgctgggccggacggcacgacggccccatcacccgcattctggtggccccgggcctgtggctgcagaacttcactacctttgagccggacgactccatgatggaagtgggcatcaaagcgctggagctggtcctgccggagaagcagggcgaggacgcctggtaaagcaccggaggcgcttggttgaattaggaattttagctgttgtggggagccttccagttggagggggggttcctgctgcgggagccttggagagcgtggcggggaatcaggaccggaccgtgtgcggcggagctggacaaaataattcctcattcctaattgaaaaaatggggggagctgaatggcgacgacctataacaacctatacctggacacccgggcgcggctgagaaaggcaggcatcgacgccgcccagctggaggcccgggaactgctgtgctatgcctctgacaagagccgggaacagctgtaccgggacatgtccctctatgtttcggcggagctggagcggcgggtggaggagctggtccagcgccgcctggcgggggagccggtagcctatatcgtgggggagtgggagttctatggcctccctctggatatctccagcgacgtgctcatccccagaagtgacacagaggtgctggccgaacgggctatcctccgtgccagagcggcaggcgagggagcccgggtgctggacctgtgcgccggcagcggctgcgtggggctggcggtggccgccaatgtgcccgcctgccgggtggtgctgggggagctgtcggaaggagccttgcgggtgtgcaagcagaacgtccgccgcaacagcctgaacgcccgggtcacctgtgtcagcgtcaatgccctggagcccccggcctctgccctgtgggactttgacatcatcgcctgcaacccaccctatatccccactggagacatcccgggcctggatgtctccgtgcgggactatgagccccatatggccctggacggcggggcggacggcctggatttttaccgggccgtgacccagaagtggaaaagcgccctgcggctggggggcagcctgatctttgaggtgggcatcggacaggcccccagcgtggaggacatcctggcccgaaacggctttgaaggcatacagaccaccgcagacacccaggggatctggcgggtggtagaggggaccgtgaaccgttaatggcatatggaaagacgaagaaatggatgataggcggggcggcgctggcggggaccgcggtcctgacggccgccctgtggcagggactgactctgcgccgctacgccttgcatacggacaagctttccgccccagtgcgcctgctgctgctcaccgacctgcacagcacattttatggacgggcgcagcgggggctgctctccgccatccaggcccagacgcccgacgccgtcctcctggcgggggacatggcagacgactcccggggcgacgccggggtggatgccctgatgtccgccctgggtggggcatgtccctgctgctatgtgtcgggcaaccatgaggtgcgcaccggctgtttggaggcgctgaagaggcgcttccggagctgggggatcaccgtgctggagggcagcggcactctgttggcgacgccggggggcacactccggatctgcggggtggacgacccctccgcctttgccggcgagtcggggtggctggagcagttccgggcctgccaggcgctgacgggggacagccggtacacagtgctgctctcccaccggccggagcggacggaatgttaccgggacagtggattcgatctggtggtgtcgggccatgcccatggcgggcaggtccgcctgccggggatgatcaacggcctgttcgccccgcaccagggggccttcccggactacgccggcgggctctacgccctggggagcaccaccctggtggtgagccgggggctctgccggaacctgctgccccgggtgttcaatccccctgagctggtggcgctggatctgctgcccgcagaggacaaggcgctgtgaaccttaagagaaaagtgggcccggagacggctgcgccgcccccggggatggaaaggatcgatcagaatggctgaaaagaaaaagagcgtggagtctgcctcccccgcctctgataagaagaaggctctggagaccgccatggcccagatcgagcgggcctatggcaagggctccatcatgcgcctgggagagaacgcaggggtggtggtggacgccatccccaccggctccctgtccctggacatcgccctggggatcggcggcgtgcccaaggggcgcatcattgagatctacgggccggagtcctccggtaagaccaccctggccctgcacatcgtggcggaggcccagaagcgcgggggcgaggtggccttcatcgacgcggagcacgccctggacccctcctatgcccgcgccctgggggtggacatcgactccatgctcatctcccagccagacaccggcgagcagggtctggagatctgtgaggccctggtccggtccggtgccatcgacgtggtggtggtggactcggtagccgccctggtgccccgggcggagatcgagggggacatgggggacagccatgtaggcctgctggcccggctgatgagccaggccctgcggaagctggccggctccatcgccaagaccaactgcatcgtcatcttcatcaaccagctgcgggaaaaggtaggggtcatgtacggcaatccggaggtgaccaccggcggccgggcgctgaagttctacgcctcggtgcgcatcgacgtgcgccgggtggaggcactgaagaacggcggcgaggtcatcggcaaccgcacccgggccaagatcgtgaagaacaaggtgtccccccccttccgggaggcggagttcgacatcatgtacggcgagggcatctccaagtggggcgagctggtggatctggccgtcaagctggacattcttcagaagtccggctcatggttctccatgggggagacccgcctgggccagggccgagatgcggtgaaggagtacctgaaaaataacccggagctggccgaccgcatcgaggccgaggtgcgggccaactccttcaagctgatgagtaaacagtcccagatcgccgccagggccgcaggccgggcggtggacgtgtccgccgacgactttgaggacggggcggacgggcagtaagccgtggtcatccaggatctgaagccctcccggcgtgtggagggccgctggctggcggtgctggaggacggctccatcctccggctgggggagggcgaggtggtggacttcgccctctatgccggcaaggagctgtcggagggggaggccgaggcccttacccaggcggcacgccggagcggactgcgccagaaagccctcaacctgctgacctccaaacccatgtcccgccgggagctggagcagaagctccgaagctgggaggcgggggaggaggaggcagccgccatcgctgaccggatgaaggagctgggcttcctcaacgacgccgcctatgccgcccaggtggtccgctattactccgcgaagggatacggggagcggaagctgcgggacgaactgtaccgccgggggattccccgggagctgtgggacgaggccctggagggggccgcggacccctccgccgccattgaggagtttctgcggaaaaagtggaggggcacgctccccgatgatccacgggagctgaaaaaggcctctgacgccctggcccgccggggctactcctggtccgacatcgtcgagggcctgcgccgctacggggctgaggcagaatcagatgaataggcagagcggccgtcatcacttgcacgcccagccgcagccctgccagaaaagcggtttgttcctgccatgcaaaggccagaaaatgggcctgctcaaaggtaaatgtcaaggagaatattatgtgtggcacaaaaatatttggggaacggatctttcagatgtggcgaaaggatggcctgagtcaaaaacagctgggagatgtagtcgggctgtctcaccaaggcaatcagcaccaaagtatcgtctgattacctattgggaattacagacgatccctcctggcgggggaaataaggcatccaatgggcgggccgaataatgtcactcgaaggggccaaagagacaatgagacatcttaccgcccaaaaggtggcagaatttctgatataaaattaagaaatattggagcgatacatcatgccatacaaagtagcctttgtatccttgggctgcgccaaaaatctggtgaacaccgagcagatgatggccctgtgccggagagcggggtacgacgtcacgggtgaaacggagggggccgacgtggcagtgctgaacacctgcggcttcatcgagtcggccaagagcgaggccatcaacagcatcctggagctggcggagctgaaaaaggcaggtaagctgaagaagctgctggtggcgggttgcctgacccagcgctaccgtgaggagatccgcacggagctgcccgaggtggacgggatgctgggcaccggcagctataccgatgtggcctccgccgtggcggagctgatggagggggagcggccggagcactttggcgatatccaccgcacctatgaggacggggagcggatggtcaccaccccaccctacaccgcctttttgaaaatcgcggaggggtgcagcaacggctgcgctttctgcatcatccccaagctccgggggcgctaccgcagccgctctatggaggccctggtggaggaggcacggggattggccgcctccggcgtgaaggagctcatcgtcattgctcaggacatcacccggtatgggctggaccggaaggacggctccaccctggccaagctgctggacaggctgtgtgagctggacttccactggatcaggcttcactacctctaccccgaggcggtgacggacgagctgatcgagaccatcgcccgccagcccaagatcctccactatctggatatccccatccagcactgcaacgacgccatcctgaaggctatgcgccgccggaacaccagggcggagatcgaggcgctgttcgccaagctgcggaaggccatgcctgacgtggtgctgcgcacctccctgatctgcggactgcccggcgagggggaggcggagtttgaggagctgtgccacttcctgcgggagcagcgcatccagcgggccggcgtcttccagttctcccctgaggaggggaccctggctgccgccatggagggccaggtggacccggacaccgccgcccggcgggtggaactggtggtggacctccaatcccgggtcatggacgagtacaatgaggagcggctgggcaccgtgatggaggtgctgtgcgagggcttcgacagcgcggaggggtgctacacgggccggacctacgccgactccccggacattgacgggagggtgctcttcaccgccgccggagtgatcccggcgggcaccttcgtcaacgtgcgcatcaccggcatgtccgacggagacttgacgggcgagatcgaggaatgatgcgattttacacggcgtgaggtgtgttttaccgaaaaagacatgggagggtagacgatgcctttggtttgtgataaactgtctatccggctgaaggagcagggattacggaagtatgatctgcgaaaggacaagatcattggcatgtctgcactgggaaaattgcgtaaaaatgagggacatatagacacccggacgattgaggcgctgtgtgaatatccccactgccagccgggcgacatcatagagtattttcccgaaggggaaacggataaaggagatagtaacggatgaataccgccaacaagctgaccctgctacgggtggtcatgatccccgcgtttctgctggtgctctatctggacgtgcccggcgccagctactgggccctggccatcttcgtggcagccagccttaccgacaccctggacggctatatcgcccggcattacaaccaggtgacggacttcggtaagttcatggaccccctggcggacaagtgcctggtggtggctgccatgctgtggttcgtggagatcggccagatgccggcctgggcggtgctcattgtagtcatccgggagtttgccgtcagcggcctgcggatggtggccgccgacaaggggcgggtcatcgccgccggctggtcggggaaggtgaagactgcctctaccatggtgtgcatcgtgctcatgctcatcccccccgtggctcgggagatcagctccctgtgcgtggcggtcatcgtgctgaccaccatctactccggggtggagtatttcatcaagaatctggatgtgctgtccggaacaaaatgagtgcattttccataatagcctgtattcaaatcagagagccccgtctgtctcaaacagacggggcttttttaccagaccccctcaaagaaagggaatttgagaatgaggcgctgcgatcacagagcatccgggcacggggcaacacgcccccgcacaggagtgggaggaagcggaaaacggccccgcaggccggaaacgctgggcacaacagctaaaatgacacggggagttcacccctctgacttgtatttccagggaatacggcgtaaactagggccagaaatagggtggggagggcataaaatgctgcgtgagtggagatttgaacggacaacagagccagaagaggtgcacaaggcagagctgaaacagagaagagcaaatctggcgggcctccagcagcggctgaagcaggcggggctgccggtgatcgtattggtggaggggtggggagcggccggaaaggggagcgtgatccgctccctgatccgggagctggacccccggtttttcaaggtgatcagtgtctccatgcccacagaggaggaacgccgctggcccttcctgaagcgctacgttcagagcatcccggaggcgggaaaggtcctcttcctggactcgggatggatggatgagacggtgcgggaacggctgcagggtggcctgtccgagcgggagtatgcccggaggctggagagcgtgaggatgatggagcggcagctggcggcaggcggctatctgctggtgaagctgttcctccacatcgacagggagcgccagcggaaacggctgaagaagttagccagccacaaggacacggcctggagggcaggggaaaatgactggcggcagaacaagaactatgggcggacgctggatgctttccaggattttatgtctgccactgacgcaccctgggcccgctggaaggtgatcgacggctcccatgccgtccgggcgcagctggaagcggcggactggctgtaccaccagatctgcaccgccctggactgccggcccgcagcggagcagccgaagagggagtggcccctgctgcccatggaacccctgtcccaggtgagattggatcaggccctgggggagaaggagtaccggaagcagctgaagaagtgccggaaggagctggcggagcttcacaatgagctctaccggaaaaaggtgccggtggtcatcgtctacgaggggtgggacgccgcagggaagggaggcaacatcaagcgcctggcctccgccctggaccctcggggctatgaggtcatccccatcgccgcccccacccacgacgagctggccaggcattacctgtggcggttctgggaacgcctgccaaagacgggccacatcgccatctttgaccgcagctggtacgggcgggtgatggtggagcggctggagggcttctgttcggaggcagagtggcagcgggcctatgacgagatcaacgagtttgagcgggagctcaccgatgccgggacggtggtggtgaaattttgggtgcagatcgacaaggacacccagctggcccggttccgggagcggcagaacaccccggagaagcagtggaagatcacggaggaggactggcggaaccgggagaagtgggacgcctatgaggaagcggtggacgagatgctggccaggaccagtacggagcgggcgccgtggcatatcctggagtcggtggacaagcggtatgcccggatcaaggccatgaggctggtcatcggtgccatccggcagacgctggaccggtgagcaaggagaggccccggcggggaggaagccctgccggggcatttcccgtctcagaaggagatgcggagggaaaagagacgggaaaatggaaaaaccgcccctctttttccgaagggcggtttgcggatattgatatttacagcaggccgcgcactggtgggagagtcagccgtgagagtggtcggggtcccggagcaggacctggtcgccggcctggtactccttggcgtagcggccgggggaggtgccggtgagatgaccaaaggtgcggatgaaatgggagttgtcggagaaaccggacagctcccccgcctgctggacgctgaccccctcctggagcagctgccgggcccggaggatgcggctgtaaatgatatactccatgacggaaaagccggtggccgacttgaagatgcggcacagatagtgcttgctgatgaagaacctgccggcgatctgatccagggtcaggggctcagccaggttgtcccggatatagtccaggatgggcgccacccgcagaaagtccttgttgcggatggcctcgccggcggtggaggcgttgaggacaggggcgacgcggatcagcaggttgagcagggcaatggtctggtggatgtcgctgccgaaggagccgtcgtttttgttgcgctccagggcctgaaacagctcgatgatctcggtcatctcgtcggtggacagggcggcacggcggaagctgtcgtgggtcagctgggtcaggtcggtctggggggtggacagctcggcaagggccttccggccgatatggaggatataccgggcgtggaagccggtggcgatggtgcggtggagggtgttctccccgatgaggtacaaggtgccccgctggaggggatagacctggtcgttgacgaagatgtttcccgggctggtcagggggagcaggagctcgtagtggtcgtggaaatggaggcggctcatgttccaggtcacattgtgattcagctgtaaatgaaattcaacattggtcatgaaactacctcaaatacccttaaaaaagtgaagtttctggtaaaattgcagagggtttggcttgcccaacttcctttgttgtggtattataacatacgtagtgaagatatgcaaactttttgccaaattagcaaaggaaatccatcggagcctgtgataaactggcctacgatgaaaatgaggcagattgcaattttcacaacaggaagaagagcaaagaaagcaagcgagaccgtacattccaaatcttttgtaatgggggtattaccatgaacaaagtgtacaccttgcacgatgcgatcgcgaaatacgtcgagactggagactgcatctccttcggcggcttcacgaccaaccgcaagccctatgctgccgtggcagagattctgcgccaggggcagggcgacttcaccgtctgggctggtcctgccggcggcgactgggacatgatgatcggagagggccgcgtcaaggcctacatcaactgctacaccgccaactccggctataccaatgtctcccgccgcttccgcgccgccattgagaagggcgagctggcctatgaggactactctcaggacgtggtcatgctggccctccatgctgcctccctgggccttcccttcctgcctgtccgtctgatgcagggctccggcctgaccaagtactggggcatcagcgaggagcagcgcaagaccctggacaaggtggacgacctgaagtatgtggagatggacaaccccttcaaccccggcgagaagatcgtggccgtccccgtgcccaagctggacaccgccatcatccacgtgcagaaggccagccccgacggcacctgcatcatcgagggcgacgagttccatgacgtggacatcgctgtggccgcccgcaaggtcatcgtcacctgtgacgagctggtgagcgacgagtacatccgccgcgatcccaccctgacccgcatcttcggcgagtgcgtggacgctgtggtccactgcccctatggtgcctggccctcccagtgctacaactactacgacaacgactcccacgctctgaaggagtacgacaaggcctccaagtatcaggacgccgaggacgccaaggcccagctggccaaggctgccgccaaggctgagaaggccgccgcggccaagcccgaggacgagaagctggccgaggccgctgcccgggccaagaaggctgccgatgacgccgccgccggcgtggccgtccccgagaccttcaaggactacctggacaagtgggtgtacagtgtgaaggaccacgacgagctgctggacaagatcggcggcgcccgtctgatgcgcctgaagaacgagccccatctgggttattccaccagacactaagagttgggaggtttacgacaatggctgattatacgaagtacaccaagcaggaaatgcaggcctatgccatcgcgaagaacatcaaggagaatcagatcgtcatcgtgggcaccggccttcctctgatcggcgcctctctggccaagcgggtggtctgcccctcctgccaccccatcgtggagagcggcctgatggactgctcccctgtggaggtcccccgttctgtgggcgataaccgcttcatggctcactgcgccgttcagtggcccaacatccgcttcatcggctttgaggccaacgagtggctgcacgacgctgaccggctcatcgccttcatcggcggcgcccagatcgatccttacggcaacgtgaactccacctgcatctatggcaagggcgactatgtcaagccccagacccggttcaccggctccggcggcgccaacggcatcgccaccttctgcaataccatcatcatgatgcagcaccagaagcgccgcttcatggagaagatcgactacatcacctcctgcggctggatggacggccccggcggccgtgagcgcgccggcctgcccggcaaccgcggtccccagatggtcgtcaccgacctgggcatcatgaagttcgacgaggagaccaagcggatgtatctggcttactactatcccttctcctcccctgagatggtccaggagaacaccggcttcgaggtggacgtgtcccgcgcccagctcttcgagggcccctctcctgagatcatccgggtcatccgcgaggagatcgaccccggccaggcctttatcaaggtccccaaggaataagagatcccgctccggaacaccatactaccaacataggaggaattgacattgggtaactattctatgccccgatacttccagaacatgcccgtggtgggcaagcccgtccgcgccaacgcggaaaacgtggctgagctgaaggccatcgaggaggagatccacgcccagatcgtgaagggcctggagaacggcaaggccgacgcggacatgaatgccaagggccagctcaccgccatgcagcgggtgtccctgctggtggaccccggcacctggtgccccctgaacagcctgtacaaccccgagaagaacaagaccggcaccacctccatcgtcaagggcctgggccgtgtcaacggcaagtggtgcgtcatcatcgcctccgacaacaagaagcacgccggcacctgggtgcccggccaggctgacaacctgctgcggggcagcgacaccgccaagcggctgcgcatccccctgatctatctgctggagtgcgccggcgtggagctggaccagcaggagaaggtgtaccccaaccgccggggcggcggcacccccttctatcgcaactccgagctcaaccagatgggcatccccgtcatcgtgggcatccacggcaccaaccccgccggcggcggctaccactccatcagccccaccgtcctggtggcccatgagaaggccaacatggccgtgggcggcgccggcatcgtgggcggcatgaaccccaagccccatgtggacatggaggccgctctggcccagatcgaggccaccaagggcctgcgggccgatcctcccggatctgtctccatccacttcggacagaccggcttcttccgcgaggtgtacaacacccaggagggcgtcatcgccggcatcaagaagtatgtggatatgctgcccagctatgacctggagttcttccgcgtggatgcgccccagtctcccgccgtctccgacgaggagctgtacgacctggtgctcaacaacaagaaccgtccttatgacatgtactccgtcatcgcccgcctgttcgacggcagccagttcatggagtacaagaagggctacggccccgagatgatcaccggtctggccaaggtggacggcctgttggtgggtgtggtagccaaccagcagggcgtgttccccaactaccctgagtacaagatggagaagtacggccagtccatgggcgccggcggcaagctgtaccgccagggactgatcaagatgaacgagttcgtcaccctgtgcgcccgcgaccgcatccccatgatctggatccaggacaccactggcatcgacgtaggcgatgacgccgaggtcgccgagctgctgggtctgggccagtccctgatctactccatccagaccagcaagctgcccatgatggagatcaccctgcgccgcggcactgccgccgctcactatgtgctgggcggcccccagggcaacgacaacaacgccttctccctgggcaccgccgccactgagatcaatgtcatgaatggcaagaccgccgccaacgccatgtacaccggccgtctggccaaggatcagaaggcgggcaaggatctccagcccaccatcgataagatgaacgccctgatcgacgactacgatgtgaagtccaagcctctgttctgcgcccaggccggcctggtggacgagatcgtggacatgcccatgatgcgcaactacatcgtggccttcactgatgctgtctatcagaaccccgagtccatctgccccttccatcagatgctgctgccccgtaccatccgggactacgacaacctgaagaagtaagggcctttcccacacaaatgcgccccctccgcccgggccacagccggtcccagcggagggggagagcagcggcccggcgcaggtgtgacagcgccgggggtcctggagaaagcagtctccggcgggaccacacaatttctgacattggagcgaaaccatggataaaatttacacgctgggcatcgatatcggctccaccgcctctaagtgcgtcatcctggcggatggcaaggagctggtcagcaagtccctcatccccgtgggagcggggaccagcggcccccagcgggccatcagcgacgtactggagaacgccgggctgaagcgggaggacatgggctatgtcctggccacaggttacggtcgcaactccatgctggagatcgcagaccagcagatgagcgagctgagctgccacgccagaggagccagcttcctttttcctgaagtccacaccgtcatcgacatcgggggccaggatgtgaaggtgctccagatcgagaacggggtcatgaccaactttgtcatgaacgacaagtgtgctgccggcaccggccggttcctggacgtgatggcccgggtgctggaggtgaaggtggaggacctggggacgctgggggcgcagtccaccaagaacgtgtccatcagctctacctgcactgtctttgccgagagcgaggtcatcagccagctgtctctggacactgacaaacgggatatcatcaacggcatccaccactccgtggccagccgggtggcaggccttgcccaccgggtaggcgtccgggatcaggtggtcatgaccggcggcgtggcacagaacaccggcgtggtcaaggcgctggaggaggaactgggccacatcatctatacctcgcccctgacccagtacaacggggctctgggggcggcgctgttcgcctatcagaggtatcagaaggaacaaaagggatgaaaaaagtcctgtttggtatcgcactgatcctgttcgccgtagtactgctgttgtcagggatatggctgccagtcataagtgacctgatggatagaacggagtttgccgtccttgtcgcggccatcggactggtgattgccgggatcggcgcgtttaccagggagaaatgatccatttcgggctgttttcccagcggccccgcaacattgaaacattgatttttctagtgaatctagtgaggaggagaagaacaatggctaaaactgtaagccccggcgttcaggcgctgcgcaaggtcgtcgaggatgtgtacgccgacgcccgcaaggccaaggccgagggcaagctggtgggctggtccagctccaagttcccctgtgagctggccgaggcctttgatctgaacgtcatgtaccccgagaaccaggctgccggcattgccgccaaccgggacggcgagatcatgtgcaaggctgccgaggacttgggctttgacaacgacatctgcggctacgcccgcatcagcctggcctacgccgccggcaagcgtgcttcccgcaaggtggacctggagaccggtgagtatgtcatcaaccccaacagcggcaaacccctgaaggacgagaacggcaacgtggtcattgaccccgagaccggcaagcccaagaaggaccccaagaccatgcagccctacacggtgctggacgacatctatgagatcgaggccctgcctgagggccgggagaaggagctgcggaaggcggctatcaagccctaccgccagatgcagatgcctcagcccgacttcatgctctgctgcaacaacatctgcaactgcatgaccaagtggtatgagaacatcgcccgcatgcgcaacatccccctgatcatgatcgatatcccctacaacaacactgttgatgtccatgacaccaatgtggcctatgtccgcgcccagttcgactccgccatcaagcagctggaggagctgaccggcaagaagttcgacgagaagaagtttgagcaggcctgcgccaatgccaaccgcaccgcccaggcctggctgcgggtgtgcgattacctgcagtacaaaccctccccctacagcggcttcgatctgttcaaccacatggccgacgtagtgactgcccgcggcaaggtggccgccgccgaggcctttgagctgctggagaaggacctggaggaggccgtcaagaacggcacctccaccacccccttccctgagaagtaccgtgtcatgttcgagggcattccctgctggcccaagctgcccaatctgttcaagcctctgaaggagcatggcgtcaacgtcaccgccgtggtgtatgcccccgctttcggctttgtgtacaataatatggacgagatggtccgcgcctactacaaggcccccaactccgtgtgtatcgagcagggcgtggattggcgcgaaggcatctgccgggacaacaaggtggacggcgtgctggtccactataaccgctcctgcaagccctggtccggctacatggccgagatgcagcgccgctttaccaaggatctgggtgtcccctgtgccggttttgacggagaccaggctgacccccggaacttcaacgaggcccagtatgagacccgtgtccagggcctggtggaggccatggaggccaatcaagcgaagaaggaggccgaggcgaaatgagcaccgaggttttgctgaacgagttcaaggagtattccgagcacccctaccgtgtgctgagcgagtacaagaagcagggcaaaaaggtgatcggaatgctgccctactatgcccctgccgagctggtggtggccgccggcatggtgcccatgggcatctggggaagcaacaagaagaccattgctctggctaaggagtactgcgccaccttctactgcaccatcgcccagctggcgctggagatgctgctggacggcaccctggatcagctggacggcgtcatcacccccaccatctgtgataccctgcggcccatgagccagaacatccgcgtagccatgagcgacaagctgccctgcatcttcctggcccatccccagtaccgcaagcccgctttcggcctgcagttcacggtggaccagtacatgcacgtcaagtctgagctggagaagatcgccggcaaggagatcaccgatgacgacctgcgggccgctatcaaggtgatgaaccgcagccgcgccgcccgccgggctttcgtcaagctggccagcgagcactgtgatgtcatctccgccgtcagccgctccgccgtgctgcgctccgcttggttcatggagcccgccgtctacgccgagaagctggaggccctgaacgccgagctggcccagctgcccgcagccaactggaagggcagaaagatcgtcacctccggcatcatctgcgacaaccccaagctgctccagatctttgacgacaacaacatcgccattgccgccgacgacgtggcccaagagagccgcgctttccgggtggatgccagcgaggagggcgatcccatgatggccctggcccagcagttcgctgatcaggactatgatgtcctgctctacgatgagcactccagccagaaccgccggggcgagttcgtggcccagctggccaaggacagcggtgcccagggcgtggtcctgttcatgcagcagttctgcgaccccgaagagatggagtacccctatctgaagaaggcgctggacgaggccggcgtgccccacatcaagctgggtgtggaccagcagatgcgggacttcgggcaggccagcaccgccatccaggcatttgccgacgtgctgtaaagatcccatgcagaaaatcggtcttctgggccgaaacccttgaaaaattcccgctgaagtgatataatgccaccaatttcgggtttctccccctgtgtcccgtcacgggaacagggggagtccgggaaaatggacgtccgattgggaggggcctgcgcccggcccaagccggtgaccataaaataatcaaagaaggggaaagatagactatgaactacaacgtaactgtaaatggaaaagtttacagcgtgactgtggaaaagactggagccgccgctcctgccgctgtcgctcccgtggccgcccctgtggctgccgctcctgtcgccgcccccgcgcccgctgctgctcccgcccccgccgctcgggcgcccgctgctgctccccccacagtggccccccgtgagacggctgtcaacagccccatgcccggcaatatcttcaaggtggagtgctccgtgggccaggccgtgaaggctggcgacgtgctggtggtgctggaggccatgaagatggagatcgaggtctccgcccccgtggacggcaccgtgaaggccgtggccgccaccgtgggcaccgctgtcaacactgacgatctgctggtcaccctgggttaaaagtagggggtacagatacatgcctagtgttgataaagcaattattaacccgtttgaacctctggatgtcggtgaggccctgctggtagccgtgtccggtctgctgatcgtctttgtgatgcttgccatgctgatggcggtcattttggtgatctccaagatcgtggccgctatcgagggcaagggaaaggctcctgccgcacccgctcccaagtccgctgcccctgccgccaaaccggcagcagcccccgccgcccctgcggtggatgagggtgagctggttgcggtgatgatggccgctgtggctgaggagtccgggatgtcccccaactccttccagatcaccaacatcagtgcggctcctgccgccgctgcccccgcccctgttgctgctcctgctgcggcccccgcacctgctcccgctgccgcccccgcgcctgctgcggctcctgccgctgtggccgccggagagacggccgtcaacagccccatgcccggaaacatcttcaaggtggagtgctctgtgggccaggctgtaaaggccggcgatgtgctggtggtgctggaggccatgaagatggaaatcgaggtctccgctcccgtagacggaactgtgaaggccgtctctgccgttgtgggtactgctgtgaacaccgatgacctgctggtcaccatcggttgagaggaggggtgaagtatggaatttctgaaagaagtcatttttgcgattgctggcggttctggctttgccgctctggactggaagaccgtggtcatgctcgtcattgcctgtgtcctgctgtacatgggtatcggcaagggctttgagcccctgctgctggtccccatcgcattcggtatgctgctggccaacctgcccattaccggcttgtttgccgagcccgtctatgatgccgctacccatagtggaacagtaggctttatgtgggtactctatcagggtgtccaatacgccatttacccgtccatcatctttatgggcatcggtgccatgaccgactttggtcctctgctggctaaccccatgtccctgctgctgggcgctgctgcgcagctgggcatcttcgcagcgttcctgatggcgctggtcctgggctttactcccgctgaggctgccgccatcggcgtcatcggcggcgcagacggccccactgctatcctgacggcatcaaaattggcggtagagctgttgccggctattgccatcgcggcatactcttacatggccctgatccccatgatccagcccccgctgatgaagctgatgaccactaagaaaatgcgtcaggtcaagatgagtcagctgcgtgtggtctccaaaactgagaagatcatcttccccattgccgtgaccatcttcgtagtgctgctgatccccgatactgcacctctgattggtatgctcatgctgggcaacctgttccgtgagtgtggtgtcacggagcgtctgtctgataccgctcagaacgctctgatcaatatcgtgacgattccgctgggcttgtccgtgggctttaaggctacggccagcagcttcctgactgttgagaccctgtccattatcgctctgggtctgacggctttcctgctgtccactgctggcggcctgctgctgggcgatttgatgtatgttctgactggtggcaaggtcaatccgctgatcggctctgccggcgtgtccgccgtgcctatggcggcccgtgtgtcccaggtggtgggacagaaggagaacccctccaacttcctgctgatgcacgctatgggacccaatgtggctggcgtcatcggttccgcttgtgccgctggatttatgatcaaggtcttcggcggctgatttaaagcgattacagtttcaaacaggtgctcggcacaccggtgcagaccggtgtgccgagtgctttttccgtgcaggaaaagagatgcggcggagagaaaagagggggcatcgagggggaaaaggcggaaaaaagctgggcagaacaggggagaggaggaaggaagaaaaaatttgaaaaaaataaaaatagtacttgccaaatcgaaaaatatgtgctattatttataagctgtcagcgagagatacttctcctgcggtatgcggctgtagctcagttggatagagtgtttggctacgaaccaaaaggtcgggggttcgaatcccttcagccgtaccactcgtcgcaagcgtcgtatcgcttgcgacgagttttttcgtttcattacaaaacttatcgcgcactcactttgctgctcctcgcttccaaaccgaagcccagcgtagcgggttcggtttgatttttggcacagacctgtagccactgcatcttttttgtccacatattccaagttaaaagctatattttgatcttataaacgaggccgaaatgtagcttttctttttatcaatttgtcgaagaaacctccatgttataccgctcatgagcacatgagtagaaaacatggaggctttgttatgcctgagaatatcacttggagaggcgggacgcaatcgggggaaagagaactgcccgccgctccgccccggcgcctggcgcggggggaaacggcgggcagactgcgcctcagggcgcggcaaggtcacatgatatgctcttcggcgcagttgtccagcacacgcatccccatctccttgggtgcggcaacgggaaatttggcaatgctggtctcgtcgaatttggcacacaggcggagctgaggattgaggcgcaggtcctccatatgggacggcctgcgtgctctgcgctttgccataaaaatcacccctggcacagtatgccctaaaatccgaccgatgttgcagggaagacggccgctgcgctgggagcagggagagtcaaaacttttccatatgctgaagatccattacaaagacgaccacaccgcccacatcctgcacaacaggggtggcgggcatgaggggagggtaggggtgccccatggggatagaaaagctttggtagaccgtggctttccgttgacccgcccggcgcttcagaatgtccagcacctcatccagacggggctcttcaacgccgatcatgatggtggtgctgtgcttttttagaaatcctccggtcgagctgagcatcgtaacaaaaaagccgttttgattcagctcatagaccgtatcctcgtaatcttccccctggaggatagccaaaaccaatttcccactgtgctgttccatgtaagacctccttgtttgttcctgcagggccagaccaggtcagacccgcttttgaaaattccctaccactgagatgttgtcatccagaatgacaaagatgtttgggtcctgcttctgcagcgccttacgaagctgaagagcttcctttttggagaccactgtgagaagcatctccgtctgctctccgctgtacgccccttctccctcccattttgtaacgccgcggcccacatattcaaagaccagctgctccatctccggctttttggtgatgataagcatagtgaccatcacattttgcaggtgcgcccggtccaagcagagaaaagtaacgcaggtgaacagaatgctgtacaccaccacctgccggtcaaaaaacagaaaaccgaccccataaactgcaaagttcagggccatggagatacggccaacgctcagaagggggtgcttctgaaggcagagcagccccaggatctcttctccgcctccagagcagccagaggtgagggtcaggccggcgccagcgccgcaggcaaggccgccgatgacacaggcggtgagatgctcatcgaacagaccagactgaggaatagggatcagggccagaaaaatactgtaacaggccacacacagggcggtctttgcaaaaaaaagatgtccaaatctggaccaggccagaatgagcagggggacattgagcagaaagtaaatgatgccggccacgtcccccacagactggagagacggaaaaacagagagcaaaaccatgcgcagaagctgtgcgatccctaaaaatccgccgctgtacattccggaaggcagaataatgcagttcatggatacggaaaacagcagggagccgacaacaatgagggacatatctttgacaatctggccgctgtgccgccgaagtcccatcgcctgcttatattgtaccatacagtcccacccttatcaatccaatttatgaaatggtcccggaataccccaaagggatattccgggagcaaatctgtaggaaagcggacgatcaggcgggaatcaggccgttgtccaccaggaactgatgggcgacctccttggcgctcatgccgtccacatctacctgagcgttcatggcagccatggtagcctcgtcaatggcaccgtccagcttggagaggacctcggccagagcgggatcagactggatcagatcggcatttacgaagtttacagcgtagtagggggggaagaagcccaggtcgtcctccagagtggtcagccccagcttggagagcagagcatctgtggcaaaggcgtccaccacgtccacctcgtcgttttcaatggcagtgtagcgcaggctggcatccagtccggtgacatccttgaactcggcgttgtactggctttccagaagaggcagacagtcctcgcgctggataaactctacggtgcatcccagccgaagctcaggggacttctcgatcagatcagacagagtggtcaggccataggcctcggcggtctcgggcttgacgctcatcacataggtgttattgaagcccagaggagcggaggtatagatgttgtggtctttcatcatcatatcgctgacagtctgccaaactacgtctttatcggtattcatgggctgggccagcagattcatcagggcggtcccggtatactccacgaacatatcgatgcttccctgttccaaggcgtcaaagcagacggcggccccggccagaccgaagcgctgatccaccgtgtaatcggtgttggcctcgatcagctcggtatagagctcacccagaatattgacctcagtaaagttggaggtgcctaccacgatggtcttgtcgccgcttccggtactggagggggcagaagaaacagacccgcttccgctgccggaagagccacaggcggcaagggagagggacagcgcagccgctgtgagagcgcaggtgatttttttcaggtttttcatgacgcaagaaactcctttttcttattttggattttaaaatcaagagatcagcccagataggctcaggcaatgatggcggcataggatgccgcggagacagcgaccagggcaaagcacagcccgcctgccactgccttgcggcgggtccggacagctttgctgaggtttttgatctggtcctgaggcagcagcccctcgctggtgagggcccgttccacacggcccaggaggtaatccagagtgagggccatcacagcggaggcgaccgcccccatgacagtcataggataattgagggagttcatacccagcataatgaaccagcccagtccgttggctccggcgaaagcggcgatggtcatggtgcctaccgcacccacggcagcgatacggatgccggacatgatatagggcgtggccatgggcagctccactcggcccagctgctgcatgcgggtcagtccgatgccccgtgccacctcgagggagacaggagagatgctggagatcccggtgtaggtgtttttcagaatggggaggaacgcatagacaaacaccatgaagatggccagtgtctcaccgacgcccagaaaggggatccccatggcaagcagggccatacaggggatggactgcatcacattggcgatgccgatgaccacgctggagacctttttgcttctggtgatgaagatacccagggggacggcaatgatgagggccagaaccacggcgaagcaggtcatggccaggtggcgcaggaattcctccaccagactgtcccactcctctgcatagatcgtcagatagggaaggaaattctccgccagactgtcccaccacgatgcgggggactctatcaatgcgctgctgctgcccatataactccgctcctttctcccgcagtatgctcagggacgaactgcctgctcatagtggccagcagactgctcttggtcaaaaatcccacaagagtccggtcgtgctcgatcacggggataatgccggacacatcgtagtcgatggtggagatgatctctttgagagtggtatccccctccaccgcgacgtagtcatcggagaggtaggtctcggcggagccagagccgtctttctccgacatcagctcctccagccagaggacccccagcagacggtcccggccgtctaccaccagcaggctgtccacgccgctctggcgcatgatctgcagagcctggagcacagtccgccccctggagatggtgatgggacggcggcgcataatgtcccgggcccggatatactcggggttggcccacagacggttggcaccaataaagtccgtgacatactgattggcgggagctttcaggatccgctccggggtgtcgcactggacgatgtgcccttcctggataatgcagatgcggtcggccagcttgatggcctcgtccatgtcgtgggtgacgaatacgacagtcttttttgtttttttctggagcgtatggatctcgtcctgcagctcggcccgggtcatgggatccagagcggagaagggctcatccatcagaacgatgggggggtccaccgcaaaggcccgggctactcccacgcgctgctgctgcccgccggacagctgagaggggtattggttgcggtaggcgtccgggtccagatcgaccatccggagcatctcagtcacccgctcagagatccgctcgctggggtagccggcgatgcgcatgaccagcgcaatattttcctccacggtcagatgggggaagaggccgccggcctgaacgacatagcccaccaggttgggcagctgatttgttttgatgcggtccaccggcgtcccattgatgagcagcttgcccttctgcacattgagcagcttgttgatgctcttgagaagagtggtttttccacagccgctggagccgatgagaacaaaaaattcactgtcctgaatggtaagatccacgtggttcagaacgggcctatctttgtacgccatggacacattttgaaactcaatcataagcgtgtctcacgatcccttctttgttatggcggtatcgtaacagaatttcagttaatgtgaccctaggattctgcctctggaattaagagtgtgttagttcaggcagggacccaccgcccgctgggaagaaaaagactgcccgccccctgcaagacgcagggaacggacagtcagggacgcaggtgcagaggtcaggcctcgtcctcctgcttctggcggatcatgcggtagcccacgccgatgtgggtctggatatactgggggtggctggggtccacctccagctttttgcgcagagtggccatgaagacgcggagagagggggtatccgaaaaggcggagctgccccaaatctcgttgaggataaaattgtgggtgaggaccttcccggtatttcgagccaaaaggcagagcagcttgtactcgatgggggtgagatggatctccaccccatctcgataggcacagccggcagcatagtcgatcttcaggttcccgttctcgtagaggctggcttcctcacttaccttctggctgtcatagcggacccggcgcagggcgacccggagccgggccaggagctcgtccacggagaaaggtttagtcagatagtcatcggcgccggcgtccagcgcggccaccttgtcgctgtcctcgctccgggcggagatgacgatgatgggcaggttgctccaggtgcggacctttttgatgatgtctaccccgtccatgtcgggcaggcccaggtccagcagcatgacgtccgggcggtaagagagggcgtccaccagagcactggcccctgtcttggcccgatggaactgatagttctgggtctccagagtggtggcgatgaggtttcccaccgctgcgtcgtcttctaccataagaatgtgcggcttattcatacatttttacctccgaggccctcagggtgaaacgaaatactgacccgtggggctgatgatcctgaactgatatctcaccgccgtgagcggtgatgatggacctgcacagggagagccccaggcccagcccccgccggccatctccgcgggagttgtccgcggtataaaacatatcaaatattttctgcttggcgctgtccgcaatacctggaccgtcatcggagacctcgacctgcacaaaaggaccggcccggacagcggacaaggagatatgggaaccggcaggggtgtacttgatagcgttgttgaccagattgatgaccacctggacgatgagccgggcgtccatatccgccatcaacaaatcgtcctccagttctacagagatatggtgctgctccgcattgcggtccagatgggacagggcttcatgaaagacctcatccagaagctccgggcggatgttcagagaaacagagccgttgcccatccgggtgagggagagcagattttccaccaggttgatgagccacatggagtcatcgtagatggagcggtacaggtagcgccgcttctcctcatccagcacggccccgttctccatcaggatgccggcgttcccagatatactggtcagtggggtgcgcaggtcgtgggagatggcccgcagcagattggcgcgcagggtctcctgatgggccagctcctcgatctgctgcttggcgcgcgccgtcagctccttttccagcgccagtccgcactcgtccaggatggctactgtcagatttttttcaaaggagtccaccttctgagcattggggatggcaatgccaaccaccgccagcaccttgtcagagccgcggaccgcaatgtagaggcatttagagctgggaagggtgtgggtggtagcgccggcgtgcttgttgttgttccagacccactccgccaccgcccgctctgaggaagtgagatatgcagacatatccccgcctttggaaacggggaacagcatggcctcctgctccaatctgtcctcgtcggcggaatagatcaggacgtcccgctccagcagctttttcaactgggtggccgtgaccgccaggatctcccggctcccctccgccttctggagcttctggctggtctccagcaggatctcagtgcggtatgccttttgggcgctctggatggcctgccgtttgacacgggtggtaagagagctgcccagcagcgctacggtcagcatgacggcaaaggtggcgatatagctggggtcgctcatcaaagtaaaataggggtaggtaaaaaagtaattgaagatgaagacggagcacagggatgccagcaggctgtagctgtgccccgtggtggccatggagatggtgaggacgcccaagatatagaccatgatcacattttcagtggaaaagcccgctcgctggaagagaaagcccacggcggtgcaggcagccaggatcaggagggccttgaaaagatctcggacggagaagcgctcctggagaagatagggctgccaggagtggcgggcgggccgctggacctggtccgggatgatgtagatatccaggtcaggagccagctctcccagacggtccatcagactcttggcgcccaggagggggccgcgtttctggggactgcggcccagcacgatcttggagatcccgctgactttagcgtattccgcgatctgaatggcggggtcatccccgtagaccgtgctgatccgggcgcccagctcctctgcaagatgcagattgttccgcagctgccggcgttccttgtcgctctggccctgaaaggaaggagtctccacgaaaagcgcggtaaaggcgccgtgaaatgcctctgccatcctggcagcagtgcggatgaccttctcgttggagggagagccggacaggcagatgagaatgtgttcccgggccctggggggatatctgtccccaccggagggcttccgctccaggcggtcagcggtcctgcgcagggagagctcccgcagggcggccaaggtctgctcggtcaaaaggtgcccttcccctccgccgatggtcccggcccgcaggcgcgccagaaggtcggagggctccagatcgacgatctccacctggtcagcagagtcaaagacctggtccgggacgcgctccggggcggagaagccggtgatggaggagaccacatcgctcaggctttccagctgctgcacatccatggtggaatagacgtcaatgcccgcgcgaagcagctcggcaatatcctggtagcgcttggcgtggcgggctcccttattgttggagtgggccagctcatccactaggatcagctggggacggcggcggagggcgccgtccaggtcaaattcgccctgccctccaccgggagggatgaggggcgggagccgttccagtcctccggccagtgccagggtatcaggataggcggcgggtgccagaaagcccagcacaacgtccgtgcccgcctcttttgcgcggagggcggcgtccagcatagcgtaggtcttccccactccggcggcgtagccaaaaaagatcttcagtcggccggaggactcctgttccaaagtgtggtccccgggagtcagcccgtcagggcggggctgaggatcagaacgcaaggtatcacctcgtctcttgcttgggtcgtttatatattatagtataacacaggtggtatcagcataacattggcatttttgacggggtgtaaagattacattaaggaatctttattaatacagtatttatgcacggaaaattctcttaatctggcgctaatgtccgatgtgatataataagaaataaatgcgggacagcgcgtggcccggctgcccgccctgcggacagccgggccctggatgaacagccgcataggaacatatcagaagggaacaggagcatgatgcatgctgcggggggattctgtgccgtctttcaaacatgaccgtgtcacaccggcacaaatcattattttaggattcctgctgctgatctttactggggcagtgctgctgatgctgcccttttccacccaggagcccggaggggcctcatttggggatgcgctgttcaccgccacttccgccacctgtgtgaccggactggtgctccacgatacggcgctttactggtcaccctttgggcagctggtcattcttctgctgatccaggtgggcggaatgggagtggtcaccatcgcggtggcgattttcatgtttgcgggcaaacggatcgggttgaagcagcggtgggtgatgcaggagtccatttccgcccctcaggtgggcggcatcgtgcggatgacggggtttatcctaaaaaccgcctttttgatcgaaggggtcggggccctgcttctggccctgcggttctgcccgcaatttggtcttggaagaggactttggtacgcggtgtttcactcagtgtccgcgttctgcaatgcgggctttgatcttatgggagtaaactccccgttttcttccctcacagactacgtaggcgatcctttggtgagcaatgtgatcgcttttctgatcataattggcggcgtcggcttcctcacctggaatgacatcagggagcacaagctccactttcgacgctaccggctgcagagcaagctgatcctgaccaccacgctggccctgatcctgacagggctcctgttctttctgctgtatgagttcgaacaggggcagtgggtggacatgtccctgtgggagcggatcaacgccgcgttttttcagtccgtgacaccgcgcaccgcaggcttcaacacagtggatctgactggcctgagccagcccgcccagctgctgatcatcctgctgatgctggtgggcggttcaccgggttccacagcaggcggcttcaaaaccactacgctggcggtgatgctgctggggatccgggcagttttccgccataaggagcggccccagtgctttggaaggcgcatcgcagatgagtcgatccgaaacgcctctgccatcttcctgctttatctgctcctgttcctgacagggggcatcctgatctgctgcatagatggcgtacccctgatggcggcgctgtttgaggcggcgtccgccattggtaccgttggcctgtcgcttgggatcacgccggagctctccggggcgtccaggctgatcctgatttttttgatgtatttcgggcgtgtgggcggcctgaccatgatctatgcggtcacggccaaaggcgcaccggagctgtcccaattcccccaggagcgggtcaccataggatgagatcggagaggaacaaatcatgaagtcagtgcttttgatcgggctggggcggttcggccgccatatggcccagaagctccgggaactgcaccatgaggtaatggcggtggaccggaatgaagagcggatcaacgacgccctgccctttgtgaccaacgcacagatcggggacagcaccagtgagcagttcattgcatcgctgggggtcagtaactttgacctgtgcgtggtagcgattggagatgactttcagagctccctggagaccaccgctctgctcaaggaatacggcgctccttttgtgctctcccgggctgcccgggacgtccacgccaaattcctgctgcgcaacggtgcggacgacgtgatctatccggagaagcagacggcctcttgggccgcggtccggtacagctctgaccatgtgtttgactacatcaagctgacaccggaccattccatctatgagacggcggtgccggaatcctgggtaggaaggactgtggtccagctggcggtgaggcagaagtaccgcatcaacattctggccatcaagcgcagcggcacactggagcccctcccaggccccaatcacaccttccagtcggatgagaccctgctgatcctgggggatgaccgggacatccagagattcctgcatgtctgacaagcgataccgaatgcggcagggaggccggtccggccccggagttctgttggtccgcagcggagggggagttcccccaaaagctccctgcttacagtgttttcggaactgtgacaaaataaaaaacttctccctctgcgtgtgtccctgtccggggatgaggtagagagcgggacggcagaatacgaccgcatggcgccacggcgtcatgcggtcgtattctgatgatgctgacgcttgtctagaggctgtccccctgggacggtgtatccgctcgccggaggtcagacaggcgctgttccaggacgatgccggcctgattcaggatcccgcggatcagattctgctcaaatgcctcggggagaggatagtcatcgcaggggatgcctacaacagcctgaggcccgccatggcttcgtactgccaggtaaaggcatctggaattgggcagggtgtgggtccctgccccggcgtgcttgttgtttttacacacccagtcggccaccgccttctcctgcccacccgtatagcgggagaggagatcggactctgtttccggataaatgcgggcctgcatcagctggccgtccgggtccatggggtagtagaggatcggcctgtcgagcagctttccaagctgagagaccgcgatggcgagcacctcatgttcgccagatgcctgctggagcagctgggtggcctccaaaaggacctcggtgctgtagtttttctgtaccgccatcctggcctgcgtcttgatccggatggtcagagagctggtaagaaagctggagaggaacatgataaaaaaggtgatcacatagctgggatgagcatccaagctgaaatagggctccgtaaagaaaaagttgaaggtaagcacactgagcagcgaggagagaatgccatagaggcggccctccgtccaggtggcggtgagaagcacccccagaatatagacggtgacaatattggtctctccgaagcccagacgggaaaacagctcccccagaagggtggctgcggccaaaatgcccagcatttttccggtgtctttccaggagaaggagagctccgagggggctatcttccatttggggcggtaggcaggctgtcggtccgggataatgtagacatccagatttggtgccagctcggtgagccggtctaccagggctttcttgttccaccagccgcgccgccggcggtggttggtgcggccgagcacgattttggtcacgccgctggtcctgctgtagtctgcgatctgggcggcggggtcatcaccatatactgtggcgatccgtgcccccagatcttccgccagcttcagattggccctcaggcgcttccgattttcaccgctgagctccctggtatccggagtctccacgaagagagcggtaaaatctccttgaaaggcctcggccattcgggcggcggtacggatgacttttgcattggagggggcgctggacagacagaccaggatatggtcgctggggttgagaaagccctccggatgttgctttcgggcggtgcggttgaggcggtcagcggtccggcgcagagcgatctcccgcaaagcggcaaggttctgcttggaaaagaagtggcccagggcttgctgagcctgggcggcccggtagaccttgccctcctcgagccgggcaatcaggtcgtccggctccacatccaccacctcgacttggtcggcggagtcaaatacccagtctgggatccgctcgttgaccgttacaccggtcaagctggaaacgaggtcgtttaggctctccagatgctgaacattgacggtggtgtacacatcgatcccggcgcgcagcagctcttcaatgtcctgatagcgcttgacatggcggcagccctgtgcattggaatgggccagctcatctaccaggatgagctggggcttgcgggccagagcggcgtccagatcgaattcccgcagggtgatgcccttgtaggatacgaccaggggaggaaggcactccagaccttccaccagtttcatggtggcgggtctgatatggggctcaatatacccggccactacgtccacgcccatatctttcatctggtgggccatctccagcatggcataggttttccccacgccggccgcatagccgaaaaagatcttgagcctgccctgccggacccgcgtttcgtcggggtcgatcattcgaatttttttcagaatttcttccggagttggtcgatgttcttccaagaccatctcacctcccgtgggggatcacaacaggaaacaggatcttcagaaataccttttccgcagggccgccccggataaagtcaaaagtgatctgttttccggaggggtccaggatataaaactgccccggctggttgatgatttggaattccagctcatccagcacctgctgaagggtgagctcccactccatcatgcagaatcccgctccctcctgggcaaactcgtggagccaggcaaactccatgggctgttcgccgtcccgaagaaaaatgcgccagagatgctgcttctgctctaaagagagggcctggagatagtcgatggggctggggtctccctccagggtgaggtagcggtacagactgccgtcctgatcctccagaatctcattttcgtccagaaaagctccggcacggcggtccacagcacagcagcgggcgttatagcggatctggccgagcacatctctgaggcgggctgcatgttctgacgaatccgcctccagctttacacagaggccggagagctggtcaaagggcctgcccgacacacagcgggtacggcagaggattctgttcccctcctccagatggaaggtgagctccccggtctcgccgccgggggcggtgccatacagagcggtctcccaatgggaggagagacaggccatcagctcacggcactcctcctccaggtagctggtatcacatgcagagtcccggtagagcaggaggagaccttttgtcccctcctgatacagcagagagggggccgcagtaaaaagatcgttgatggtgcagaccagctccagtgccaaaagtcccgccggctgacggagcagagcgcgctcccgcagcggggcgcggtgttcttccgcagtctgataggggtacagcatgtcatgttcctcctttttccttcctatttgcagcgtatgcagaggcaggctgtcaagcttttgatacccgggcaggcgagccccggccgggtggatgccggcagagctcgcctgtctcagagtacttcgttatttgctgacctcaccgatgaggcccagctcctgggcgatggccaggttgacgcctagaacattgacagcctcctcgccgaagatgcccagcaccttgtgggtggtgttggcttccacgatctcttccaggcgatcctcgctcagaccggtattctcagcgagcgcggggatctggaccgccgcagaggcggggctgatgtgggggtccaggccggagccggaggcggtcagcagatcgccggggatgtcccctacggtcaggctggggtggccggacaggaaattgttgatgtcgccctccacgcgctccgccagggcgggattgctgttggcatagttagcggagccagagctcaggccggcgtactcgctgccgtcattgtagtagctcacgccatcctcacccacatagtaggtattgtagtggtactgggagggacgtcccctcataaaccggggatcggtgaactcctgacccacaaagcgggagcctaccggctgaccgtccacatagatcaagttgcctcctgcctgtgaggggaagataaggctgcccaggccggtcatcaggacgggaaagaggaatccgcagatcagcagcaggaccagagtggtcactactgcctggcggatgctgcccgccgcagagcctttgcttgtactcatattgaagaacctccttagaagccgatgaagccgatcatttccagcagaggactgatgatcaggtcgatgatcttgatgccgacaaagggagtgatgataccgccgacgccgtagatcatcaggttacggaccagcattttgctggaggacatgggacggtacttgacgcctttcatggccagagggatcaggcaggggatgatgatggcgttgaagatcagagcggacaggatcgcgctggtgggcgaggccagtcccatgatgttcaacacgcccatctcaggaatggccagcatgaacatggccgggatgatggcgaagtacttggcgatgtcgttggcaatggagaatgtggtcagagatccgcgggtgatcagcagctgtttgccgatctccaccacctccaggatcttggtggggtcggaatccagatccaccatattggcagcttccttggcggcggtggtgccggagttcatcgccagacctacgttggcctgggccagagcgggggcgtcgttggtgccgtcgccggtcatagcgacgatcttgccctcggcctgttcctgcttgatgacggtgatcttgtcctcaggcttacactccgcaatgaagccgtccacgccggcctccttggcgatggtggcagcagtcagggggttgtcgccggtgcacatgatggtcttgatcccgatggcgcgcaggcgctcaaagcgttccaccatgccgggctttacggtatccttcagatagatgacacccagaatgcggctgccttcacaaacagtcaggggggtgccgcccagagaggagacttcgtccacccgtttgcgcagttcggcaggaattttgccgccctgggcggtgacgtacttctcgatggcgtcggccgcgcctttgcggatgatggtgccgtcggggagatccacaccgctcatgcgggtctgcgccgagaactcaatgaagctggacttgggatcgtcctccacctggcagcccagcttacggcccagctctacagtggacttgccctcgggagtgccgtcccgcagggaggtgaggaccgcgcagcggatcagctcctccttgctggcgccgcccacggggtaaaaatcagcagccaggcggttgccgtaagtgatcgtgcccgtcttgtccaggatcatagtgtccacgtcgccgcaggcttccaccgccttaccggacatggcgatgacattgaagcgggtgacacggtccatgccggcgataccgatggcggacagcaggccgccgatggtagtagggatcaggcagaccagcagggcaatcaaagtggagatggggatctgaacattgttgtacaccgcaaagggatacatggtgaccaccacgatcaggaagatgatggtcagggacaccagaagggtgttcagagcgatctcgttgggggttttcttccgggaggcaccctctaccagagcgatcatgcggtccagaaagctgttgcccggctcagaggtgatgcggatcttcagccagtcagacacaacggtggtgccgccggtgacggagcagaagtcgccgccgctctcccggaccacgggggcggactcgccggtgatggcggactcatccaccgaggcaatgccctcaatgacctcgccgtcgttgggaatgatctcgccggcgctgaccaggaccacatcgcccttcttcagctcgctggaggagacgatggtctgagtgccatcctcgtggagcaggtgtgcctgggtatccttctgggtctttttcagagaggccgcctgggccttgccccggccttcagccacggcctccgcgaagttggcaaacagaacagtgacaaataggatcgcacagacaatgatatcatagatccgcagctgctcggcattggcatcgccgaacaaacctggtacgaaggagagcagcagggtgatgaagaatccgatctccactacgaacatgaccgggtttttcatcatgtagcgggggttcagcttgataaacgcacccttcaccgcacccttcaggatatcaggggtgataaattttgtattctgctttttactcatggttcaaaagccctccttaagcccacagagtcagatgctctgcaatggggcccagcgccagcgccgggaagaaggtcagcgcagcgaagatgtaaacaacgcacaccaggccgatggtgaaggtggcgctgtcggtccgcagagtgccaatggaatcgttgacgaactgcttgcgcatcagggaaccggcaatggccagctggatcacgatggacagatagcggccgaagaacatggccagaccggcggtgatgttccagaagtaggagttgtccgccagaccctcgaagccggaaccgttgttggcagcggaagaggcgtactcatacaggacctgggacaggccatggaagccggggttggtgatgccggccagaccgccttcggtagagaccgccaaggcagagaaggccaggatcaggaaggggtggataatgatgcacagagcggtgagcttcatctcccggccctcgatcttcttgcccaggtactccggggtacggccgatcatcaggccaaagatgaacacgccgagaatagcatacatgatcatgttcatcaggcccacgcccttgccgccgaacaccacattgagcatcatgtgcagcaggggaatcatgccgcccaggggagtcagagtatcatgcatgttgttgaccgtgccagtagtaaaagaggtggtagtggtggtgaacatggcggactgggcaataccgaagcggacttccttgccctccatgctgcccatggactgatccagccccagtttggccaaggccgggttgccctggctctcagaccagtagcagacactcaggccgatgaggaagatgatgcccatggcgaagaagatggtgcggccctcggagccgtagagcttcgcggtgaagctgggcttgctcaccagttcgctggtcttgaccagatcctgggtggtggcgctgtgctcactggagctggcggtcttacggcggcggtctttgaccatcttgccgaacatgatcacgcaggcgccgggcaggatcatcatggagtagagctccaccagatcgctgatgatggtggggttctcaatgggagtagaggagttggcacccaggaagccgccgccgttggtgccgatgtgcttgatgatctccagcgcggccacggggcccattgcgatatcctgctgagtcccctcaatggtggtcaccgtcacgttgggatcgaaattctgggggacgccctgccagatcaggagcatgccgccgatgatggaaagagggatcagaacgcgggtggtcaccttgaccaaatcagcatagaagttgcccacgttgtccttgctcttgccagccagtccgcggacaaaggcgatgcaggcggcgtagccagtggcggcggacacgaacatcatgtaagtgatgaccagcatctggctgagataggacaggccggactcaccggagtagtgctgtaagttggtgttggtcatgaaggagatgatcgtgttgaaggacagggtctcctccatcgcgccgatgccgttggggttgaagatgggaagaaactgaattctcaggaccagatagccgacaaacaccatcacggcgttggtcagcagaagagccagcgcatactgcttccagttcatgcccttgtcgggatgaatgccgcacaccttgaagatcccgccgtccacccggtcgaacaccggatcggcgaaggtgcgctggccggaagcaatatgatacagatagttcccgatcgggatgacaatgatcatgaagatgatcactgttaggacaagctgtaacatatgtgttgttcctcctgtgcgaaactcgctttacaaatgacacatttggggtcagaaacgttcagggtgtaccagggcgtaaaccagatagccgcccatcagcacgatgatcgcacctaataaaatcatacccatactcaataccttctctcattcctcgtggaactgatgctcacaccagtcagccagcagctttactgatccgaagcagaccaataagaccgcgatcatgatgacgtctttcatagaaaccatcctttccaaagttctgtttccggaacggacgtattatagcacgcaggggattagcaggcggttaacgtattcacaggagaattaaacttgcattaagaaaaagaaataaaaaagataaaaagaaagaaggacaattggctcctaatacaattttaatacggcggatgatttgcaaatctcacacaaacagggcttgtagtagaatcacttttaaggaagtgatcttgtggaagctctggtactggtgggcgggacgctgtttgtctggaccgtcggattctgggcggtgggccagctggaccgctttttcaaggagaaaaacgctccctgccggagggagcgggaggggcagacccgcagaaaaagaaaagttctgtgccggaacgcgggaaaagcggagggacagaggtaagacaaggggaggggcccagactgtgtttttacatagtctgggcccctcctgtattcgaaacaggtctacgaccgcagaaacaaaaaagtctggccttgctgtatcgattttccgcggaagatgggccgggccgctccagcggcttcaattcgcactgcccccgttgctgactggcagcggtgtgggcagcttaaacgcccactttgcggtgccctgggggtgcaggacctgctctatgagatgtccgccacgcggaagccgggcgggtgcgcggatctgctctgcctgagtctgatgctgtttttcctggaggaaaaggggggccgggagtggacaaaaaagagattgcaatcgacaatggaatatggtaatatcaacatataaactgtgtcgtatttcgcctggattggtgaaaatacagaaagcgggctggttcagaaaagggaccaggaccgctttctgtgttatttggggaagtgtagattttttaacagaggatgcaggaaatgcgtcacttcaaaaaagcagggaaacttgcaaaaacgcggactgccgcgggacaagacaggaggagcaaacggatgaaggagacaaaacagggggcgctgcccgggacggcggcgcaggccaggcagctgaaggcatggctgaaggagaacggggagaagccgggggcggcgctgcctgccctccagaaggcgcaggagatatacggctatgtcccccgggaggtccagcagctgatcgcggacgccctgcacaagccgctgacggagatctatggggtgtccaccttttactcccagttcaatctggaacccaaggggcgcaaccggatcagcgtgtgtctggggaccgcgtgctacatcaaaggcggcgggcggatctatcagctgctccaggagaaactgggcattggagacgggggatgcaccgaggacggccgcttcagcctggatgcctgccgctgcctgggctgctgcgggatggcgccggtgatgatggtgaacgaggacgtgtacggcagcctgaccggcgacgagctggacgccattctggcgaaatatgagtaaggagggactgagcgtggggcagacggaacacaaaaacattaagatccgcagccggaaggacctggaggccatccgggaacggaccaggcccctcctggaggtggagcggggagcccggatcgtggtgggcatgggcacctgcggcctagccgcgggggccaggcaggtctatgaagccatggcggaggagatccgccgactggggctggaggacgtgaccctggagccggtaggctgtgtagggatctgtcagtttgagcctgtggtggaggtgtaccagcccggaggcgtgcgcaccacctatgtgcacatgacgccggagcagggcgtgcgggtggtgcagcagcacatccggggcggcaacccgctggcggagtacaccatcggggccgtgagaagcgggaggtgaagggaatgtatcgcagctatgtgatgatatgcggggggcccaactgcaccctgctggcgggcaggcaggagaagctggcggaggaattcgaggtccagctgaagctggccggtctgcgtaaagaggtccaggtgatgcggggcggctgtctggggctgtgctccagcgggcccaacgtggcagtgttcccggagggcacgatctacagccatgtccatgtggaggacgtggcggagatcgtcagtgagcatctgctcaagggcggccgggtggaccgcctgctctacaacgagaacgaggccaccagcacagtccgcagcctggaggagacagagttctacaagaagcagctgcgcattgccctgcgcaactgcggcgtcatcgacccccagaacattgacgagtacattgcccgggacggctatgcggcactggagaagtgcctgaccgaactgacgccggacgaggtgatccagatcgtgctggactccggcctgcggggccggggcggagcaggcttccccaccggactgaagtggcgctttgccagcggggaacggggccaggtacagaaatatgtctgctgcaacgcggacgagggcgaccccggggccttcatggaccggagcgtgctggagggcgacccccacagtatcatcgaggccatggccatcgcgggctatgccatcggggccagccagggctatatctacgtccgggcggagtaccccatcgcggtgaagcacctccagatcgctctggagcaggccaggagctacggactgctgggggaggatatcttcgggacgggcttctccttcgacctggagatcaagctgggggcgggggctttcgtatgcggggaagagaccgccctgatgacctccatcgaagggaaacggggagagccccggccccggccgcccttcccggcggtgaagggcttgttccagcggcccaccatcctaaacaacgtggagacctacgccaacatctgccccatcattctgcggggggcggagtggttctcctccatcggcagcgagaagagcaaggggaccaaggtatttgccctgggcgggcgtatccagaacaccggcctggtggaggtgcccatgggcaccaccctgcgcactatcgtggaggagatcgggggcggcatcccccacgggaagaaattcaaggccgcccagaccggcggcccctccggcggatgcatccccgcggagcacatcgacacccctatcgactacgacaatctggccgccatcgggaccatgatgggctccgggggcctgatcgtgatggatgaggacacctgcatggtggacatcgcgaaattcttcctggaattcacggtggacgagagctgcggaaagtgcaccccctgccgggtgggaaccaagcgcctgttggagctgctgactaagatcactgaggggcggggcaccatggaggatctggaccggatcgaggagctggcggccttcattaagagcaacagcctgtgcggcctggggcagacggcgcccaacccagtgctgtccaccctgcgctacttccgggaggagtaccgggagcatatcctggagaagcgctgccccgccggggtgtgcaaggacctgctgacctactccattgatcctgtcaagtgccggggctgcaccatctgtgctcagaactgtccggccgacgccatcaaggggagcgtgaagaatccccacaagattgacaccagcaagtgcatcaagtgcggcagctgctatgaaaaatgccggttcggcgcggtgatccggggatgagggggagtgtgaaaatggaacatgtgagtgtgaatacagtggatgtggtgaacctcaagatcaacgggatcgcctgccgcgcccccgccggcgccaccgtcctggaggcggcccacggagcggggatcgccatccctacgctgtgttatctgaaggagctgaacgccatcggcgcctgccggatctgcgtggtggaggtgaagggggccaagaacctggtgcctgcctgcgtctatcccatcgccgatgggatagaggtgtacaccaataccgagcgggtccaggcggcacggcggaccaacctgaagctgatcctgtccatccacaatcagacctgcctgacgtgcagccgaagcggactctgtgagctccagcgcctgtgccgggaatacggggtggacaaccagatggccttcgagggggagaagatctgctacgagccggacacgagcgcggtgcatatggtccgagacaactccaaatgcatcatgtgccgccggtgcgaggctgtgtgcagcctggctcagggggtggcctgcatcggcacatcgggccggggcttcgccacccacatcggccccagctttgacagcccgctaagcgagaccgcgtgcatccactgcggacagtgcatcatcgcctgccccaccggtgccctctatgagaaggacaacacgggcctggtgtggaacgccctgggtgacccccagaagcatgtggtggtacagacggcccccagtgtccgggcggggctgggagagatgttcagcctgcccatcgggaccaatgtggaggggaagctggcggcggccctccggcggctgggtttcgacggcgtgtttgacactgatttcgcggccgacctgaccatcatggaggaggccaccgaattcctgcgccgggtccagtccgggggcacgctgcccctgatcaccagctgctgccccggctgggtaaagtactgtgagaccttccacccggacttcatccccaacctgtccacctgcaaaagccctcagcagatgttcggcgctatggccaagagctattacgccgaaaagatgggactgcggccggaggatatctttgtggtgtcggtgatgccctgcacagcgaaaaagttcgagatcacccgggagggggagtgcggcgccggcgcgggcatcccggacgtggatgttgccctgaccacccgggagctgggacagatgatccagcgggccggactgctgttcgcggagctgccggaggaggagttcgacccggccctgggcatcgcaaccggagcggggcatatcttcggcgcctccggcggcgtgatggaagcggcactgcgcacggccagcgagctgctcaccggcaaggagctggagaaggtggagttccaggaggtgcggggcgcccacggcatcaaggaggcggcctatgagatcgcaggcaggactgtccgggtgtgcgtcctcagcggaacggccaacgcgggccaggtgctggaggacatccgaagcggaaagcgggcgtatgacttcatcgagatcatggcctgcccaggcgggtgcgtgaacggcggcggccagcccctccagccctctgtgatccgcaatttccgcagtgtgtccgctatgcgggccggcgccctgtaccaggaggaccaggagatgcccctgcggaagagccacaagagcccgctgatccaggagctctatgagcactatctggaccagcccggcagtcagcgggcccaccagctgctccatacctgctacacagacagaagcggacagcaccgctgaggggaggaggcaccctataacaaaggcgcagggccgcggaactgaggttccgcggcccttgctgttagaagattcaggagctgccggtgggagagcggcagaaaaaatcacaatttcccctgtcacccggagacaggatatggtataatggggaccagagacgacaagagccgcccacatccgtgaggagcggagcggaggaaagtgaggtaagttgtggataaccaagagctgaatacccattttatcaaggtcatcggacaccggaacccggacacggactcggtctgttccgccattgcatacagccgcctgaagaacaccctggacccagagcacccctgcaagccctgccgggcgggactgctgaaccgggagacggagtttgtgctgaactattttcaggtcccagacccccagctctacacggacgtgagccctcagatccgggatgtggacatccggcggatggagggcgtggatggggagatgagcctgcgccgggcttggatcaccatgcgggaccagcagatcgacaccctgtgcgtggtggacaaggagcggaacctgaagggcctgatcaccgtgaaggacgtggccacggcgaacatggacgtgttggacacctacatcctggcggagtcagagaccagctatcagaacatcgtggacatcctggacgccaaggtgctggtgggagacatcaccggcaagaaggtggaggggcgcatcgtcatcggctcgggaagcgcggaacagatggagcggtccatctccaaaggggacatcgtcatcgtggccaaccgcagtgagagccagctcaccgccatcgagatgggggcgggctgcgtggtggtgtgcgcgggctgcaaggtgtcccggaccatctgcatgctggctgaggagcaggggtgtatgatcatcagcacccctaacagcacctatgtctccggacagatgatcagccaggccgcccccatccgccactacatggtgcgggacgatctgctcaccttcaatctgaacagctccgtggagtccgccaccaaggtgatggcctccgtccgattccgctacttcccggtgctggatgacgacgggcactacatcggcgtagtctcccgcagaaacatgatgaacctgcataaaaagcagctgatcctggtggaccacaacgaaaagggccaggcggtggaggggatcgaccaggcggagatcctggagatcatcgaccaccaccgcatcggctccatggagacagacggcccggtctatttccgcaatgtgccggttgggtgcacctgcaccatcatctatcagatgtaccgggagaacggggtggagctggaccggtccaccgccggactgctgctctccgccatcctttcggacaccctcatgttccgcagtcccacctgcacccccctggatgagcaggcgggccgggagctggccaaactgaccggggtggacctggaacagtacgccaatgctatgtttgaggcgggaggcgacgtcaccggccggaccgcagaggaggtattcaacaccgactacaagatcttcaacagcggggaggtccgcttcggcgtgggccagggcagctacttgaccgagaagaaccggaaggccagcgaggccctgatcggtccctacctccagaccgcactggaaaagcaggggctggactacattttctacatgttcaccgatgtgcgcaactccagtactgagctgctgatggcgggcaagggtgctgaatccctggtggagaaggcctttgacaccaccgtgacggacgggatggcggtcctgccgggggtgatcagccggaaaaagcagatggtccctgtgctgatcaacgccatcaagcaggagcggggctgaatacacgaaaaaacaggagcgcctggggctgtgggaccctaggcgctcctgtttttatctatgcccgcaggcttgtccgtctcacagctccacaaggtaacgctcatagcaattgaccacccgggtactcccatactgctcctcccgccggatgcctctgttgtaggagaggtgggtgtgtccatgaaggaacagggatgggtggaagaggtccagcaggcggttgaaggtctgaaagccggtatgggccagatcccggcagtccaccatgccaaagcctggggagtgggtcagcaggatgtcgaacccccggttccagagcagctttggggccagcttcagagcccgcatacacatctcacgctcagtatattggtggggccccctgctgtaccgcatggagccgcccagccccaggatgcgtaccccctgatactcgtacaggcggtcctccacacacaagcagccggcgggtggagtttcccgatacttgccgtcgtgattcccgtggacatacaggatgggacagctggcgaaggtggccaggaaggagagatagcgggggtccaggtcgccgcaggagaggatcaggtccagtccctccagcttgccgggggtatagaagtcccagagtgcccgggattcacagtcagaaatagctaagatcttcatggctcgctctgccgctccacaccctggagcttgatgagctcctgagctttttctgtaaattcttcaaattgggggatgcggccctccaccgaggtgagcagccagttcatggacagaatgcggtcggcgggcatgggggcgtcgtcgccatagaccacccggccgctctgatccatcagtacgccgtagaaggggtccagccggtcagccttcagggcctcccgcagtacaccggccagccgccggggcccggtgggcagccgtcgggagcacagcacgctgactacgccctgctccatcccccaccagtagttgaccgcactgctgccctggtcctcctgcttccagctgccttccatcacccggcggaccaggctctggtacagccggccccagtgggtctgtattagggccaggttatgccggttgcccatctgggtgcccgtgctggcggccagccggtccaggtagtcgatatagacgatcccctgggcctggagacgtcccaccgcgccgccgtcccggagatgggcccagtccagatagatgcgggcgttggcgttcaccatccgggctccctgggcgaaggcattgatgctggcgatgctgccgtaggtagggtagtcggctacatagccgatgcagccgtcccgggtcagagtgccggcaatggcccccttgataaacttggccccgtacagccgggggtaataggtgcgcaccgaggggtaggaggtgttcagggagcagttcaggatcttcacatccgggtggagagcggcctgccggacgctggagagcagcagctttggggtggtggtgaagatgacgttggcgcccctgcgcactgcatcctccacggcctggtctacctccccatcggtgcggacgttctcgtaggagagggtgcgcacctgaccgtcggtgaagttctccagaatgtgccggccatactcgtggctgtacacccatttggaggcggcggcgctgctgtcgtggatgaaggcggcgcagacccggcccggggtatagaaggagaagcggggctttttcacgtcatcttccagcagcagggcggtccccgcattttccagccggttctggatctccggccggatgcgggacagctcctcacagatctgggagggcatcttgccgcaggactcctgatagccgaagatcttgatgtaggtcaaaaaggccagggagatgcctgtgtagtcccaatccccccggaggtaggcgtcccggaacatataaaagaaggcccggaaggagtagatgtcttccgcactccaggcatcgctgtcggagcggcccagtgcttccagcagttccgggtactcgccgggctggcggaagacgatgaagttcaaacccgtcatcttgtaaaagtccagaaactcgtaataggcggccacctccgggtcgtcagacggcttgggcagcaggcgggtgacagtggccgggatagtaatagcgccgaaatacttcagcacgctgacccgcttgtggccctccatcacatagaagtggttgaggtactccaccaccttgacagggtcccggatgccctcctccaggtggatgcggcacagggcgctccacttggcggcgaactcggtgtccgccgggaggatagggtagaaccctcgggagaaagcgtccccccgaaggtggttgcaggtgccgtcgatctgctccacggggatctccgccagacccagggattcccgccgcaccgccagcttctccggggcatccggcagggtgcgggggcccgtctcctcccccagggcctgggcggctttgacctctttgagtccctggcgcatcgccttgtgatagtcctctgatggcatgccgtgcctccttttgatctggctgtaccgtaccttgtcattgcacgctttgggcctatttcaataacaaggtatcacagaaatgggaaaaattcaattcctttccccaaaaagaagggagaggtgatgtgcggcatgaggcccgacacacgcaagtggcccctggcgtgccgcagggcacgccgggggcggtgctggccagccaaatcagacggataaatccggcctccgactatcttttgatcttcaggccgatggtctggctgaagtgaaaggcgccgaagaacagcagatacaggggaagactacactgtagcgcgcctgccccggcctgcggtgaccagctgccagagggggagcagaaagaggaagaatgccgtcagcagggaggcggcgggggccccggcggaggccagggggacacccccggcaatggaccaggggatgaggggggccaccaccacggcgctgttttccagatagatggccagcttttcccggcttttctccagaccgccgcacagctggtgggtgagcatgatggacagagtctggttgcaggcgatggcgctggcgaggacggaggtgaccagcactgcggcgtagggggacaggaccgcaccccacgcctcgatgcgtctccggatgggctccagcagcccggtcctctggaaaatgccggagtaggaggaggagaggcagacgatggcccccacctggagcatggagacaatgccgcccccgtcgatcatggtggccagctccgggctttgggcggagaaacccaggacggcgtccttcaaaagggtcaggggggcggcgtcctgatagacgaggcagagcaccgcggcagcggcgatgctggccagcatggccgccttcacccgcacccgcagggcggagagcaccaaaatcagagccgccgggatgagggggaggggacccagacggaactccagggcgaagaggggggcgatgtccgccgcctgaccggcggcgggggaagacaggccgaagagcagatacagcccggcggcgagggcgaaggggaccaggctggtccgcagcatctgccggatgttcccaaacaggtcggtcccggtgaggtcggccaccagcagggcgctggtggagacgggggagcaccggtctccaaagtagaccccggacaggatggcaccaccggtcatcaacgggtcggcccccagggcggcggccatggtcatgcagacggcgcccatggtagccgccgagccgaaagcagtgccagtgaggaaggagaccaggcagttgagcagaaaggagcacaccaggaacagacggggctccattacccggacggaatagcacacaatggccgggatggtgccccccgcccgccagagagaggtgaggatgccgatgaggacgaaggtggtcaggatatttttagcggcccggaccccctgagcggacatacccagcacctccgggagagaaaagccctttcggatggcgtacagggcaaaaatgacatatcccagcagcagggcgaacaggagggagatatggaagatgacgcacaccagcagcgccgctgcgaacagagagaagacaaggagctccatgacgcacctcgggttgaagaatgacaaaaggaggggaggacctactggtcccaatgggaaaatcgtctgttgagcgtgggtacggctattataaacgaaacagaggaaaagtacaaggacgggaacgaagtccccgccccgcggcatggcgttgtgttttccggtatgtgcgataaaattcggaatgatccgcaatatgcgggggacagagatcgtgcttatcaggtgaaaggtacgtttacaggctcagggccggaaagagagcgggctatggaggaccggaagatcatcgagctgtctggatgcgtatcgaagaggcggcctgatgttttcatcaggctgtaggaggagccgctgacgaaggctcaggtagacagcggcggcgattggagctttgccagatgtgaggatatcatgatgaccacaaagacgggacctatcttttgtactatgccggccatgtgcagtttatcgcagagacggaagcggctcatacataaagagctttgaaccttataaaaatcatatttatgaggagaaccccatttgtaactccgaagtcgggttatcaatggggttctccatttatacagtttccaaatgcctatttttcatatctgcgcagaagatcaagcagttttgcggcatgttccgcttcatcttccgcaaactcggaaaacagtttggcaagcgccgagttatcctcctcgagttcatgggcataggcctgatagtcccgtacaagttcagttgaattttgccaggccctgagcacatgatcccggttagtaatggtaaaaccatttttggtatccatagaaatacctcctaagtttgatattgtttttgtatctctgtcattagctgccgtttgttcatcggtggcagacaggagtgattccggcacacatagaacgtggtttcttcgttcaacagcttatattcttccgatggatgttccaaaaccttgactatggcatcagatggcagcacaaatggaaggtcgttcaagtgctctccgttcgggactgcggtgatcaaaagcggcggctcccaaaaatctgacagagccattaaaaacatggaatatccggcaggatatcgttccgcttctcctgacatataggcaagctgtttgttcagaatgttctcaataccctgatccggcagcaatgcattcacacgtacaagcacatatgctaggagggagtttccactgggaatcgccccgtcatagcactctttcgggtgaaaaagcagcgcttcgttctctgtgccgctgagataaaagccgccatggagcgaatcgtgatactgggcgacagtttccctgatgagctgtaccgcacggcgaagaaatgtgcgttccagtgtggcatcatacagagaaagcagagcaaaaatatagcttgcataatcatccagaaaaccgcgcgctcccagtttgccgccccgaatgcttacataaagcgtatcctgatcgcacaggctgttctcaagaaaaccttgcgccttttttgcggcgtccagatatctgggatcccgactgcaccggtacagccggcaaagcgccgcgatcataagggaattccatgccgtcaaaaccttgtcatctgtatgcaggcgggtgcgactccgcctgtattcctgcaatgtgggcagaaaagggtcaaaacgggcatctgtcaaattttttgtgtggagaagattgggaatgctcttaccctcaaagttccccgcttttgtaatactgaaccgttcacaaaaggcggagccgtcggcttgccccaggagctcgatgatctcctgcggagtgaatacatagtattttccctcctcgccatcgctgtccgcatcctgggcgctgtaaaagccgccgctgggagaggtcatttcattgagaatataagaggctgtcttttctgcaactcccagataaaatgactgctccgtgagatcataggctttgcagtaggcgaggatcagcagagcgttatcatagagcatcttctcaaaatgcggaacaagataataccggtctgtggaatatcggcaaaatccgtatccaatatgatcaaacagtccgcctgcatacatcttttgcagggttatttccgccatgtttaaggcgcggctgttcccgtgcttttcgtattgctgcatcagaaacagaagattgtggggggctggaaatttcggtgcgccgccgaaaccgccaaatgacgcatcaaagttctgctgataccattgcagggcagtgtccggtaaagttttatctgcttgtgacgcaggagtacgatgctgatggagagcctccgtgattttgtttgcggagcgaagaagggcgtcccgctcgttcttccatttctgctgaataatgagcagcagttctttgagtcctacggccccgtatcgggcagtcttaggaaaataggtcccagcgaagaatggtttctgctctgcggtcataaagatgctgacaggccagccgcccctcccggtgaaagcctgacagactgccatataaatgctgtcaatgtcggggcgctcttctttatctactttgaccgacacgtagtacttgtttaagatatcagcgatttcaagatcctcaaagctttcacgggccattacatggcaccagtggcaggtgctgtagccaatgctcaaaaagatgggtttatcctctgctcttgctttgcaaaaagcttcctcgccccaggggtaccagtctaccgggttttccgcatgctggagaaggtatgggcttgtctgatatttcagatgattgctcaaatcctcacctcagtttttcagatcccccattgcggggccaccgctgccgatgctcactactttgtgttccgatctctttcctaagattgaaaattaggctgattccgagtttgctcccgtagtgatctcatatacttctccccatgatgattctgatgatagtgtggtctaaaaggagaaaagtatgtcttttcttttacgtcccatgatttggtacaaattcataggcggcatggtcgctttgaagggaaaatatcgcttttcctctttcccacagccttgcctgcaaatgcacattacagctttcccgaatggtgctggacatctttccgcactgtggcgcacgaagagggtggcccgtatgtggggatgttatatccaactccagcaggaggctgccttgagacagacagatatgttccggggtaaatgcttgaactttgacgcctctgtaggttgccaaacgatactccctgccttggtacacgatcgcgcagatgcatccgcggaaggaacttccgcaaaaggggatatgggcgatcgagatcatgatagaacatgcgctcgggaaatcgttgcactgcatccacaggtaggagcggggaaaagaggttccgctgtccttctctacatagccgagaccaccttcgaagctatgcacatatccatccattcggacgctgccttggagtgtgtgggccatgctgagaacgccgtgccggcactccatggggaaaaaacggaatggccccatgatatcggaacagagcggcgcaagcggtccgtacacgatctcaccgctgatgccgggcagctcaatatggcagccctggctcgaaaaccaacatcggtccgcctgtatcataccgttacagacggtcagatccgacacctgaaattgtcgggcaccttctcgagagatcagttggataaaatcgccgctcactgcccggccgggaatgaatgctaccatgtcatcccctttttgatgcttaaaataccagccctcaaaacctttttgtcccgacatacgcatgttacagccctcctttgaggaatggactaagtatgcccatatgagcgggatataagacgatctttatttgcttctcaacgaaacgcaggtgcatcctcttttcatgtatatacggtcccaacgcgtcataagcgtacggcggcggcctattttcgaatggataatgggttttcaaggcagctcctacctctcatgcatgatatgcacacggaagagagctgcctttcacttctgccggcggttttggatctgatcagcgttttccggaagcatacttgcccatgtgtatgtccagcacccctctgggcggctggatcagggcatcctcataccggcacgtccactggatctgacggctcagctggccgtcctctatgccgtctatggtttccccgtcctgaatggagttgtcatgctccagaatgtaggaagccgcattgtaggcgtggttcactacccagttggggtccattccgtggaagtggtactggaggtccggcaggaacagggtgctcatgcccactgtgtcgatgagcatatcctcggtgccttggatattgaagaaacggacattgaccccaaagcgaatgaaacggtccggcccctcgatctggtgagaacgcacatcctccgccagaaacagtttgccgcagttctggaaatagaacgcctcacaggtgggatacagctccgccagagccgccagaaagtcggcatccaggttggcccgctccagagccgaaagcgccgccgccagcatatcggtggctaccacctgataccggcattcccggaagatccgctcccggtcctcctggcagtcccacatctggctcatcaggaaggcgtcaaagcctttgcccttgaacttgtcgcatttcatcaccatcagctgcaccgggcatttgccatcctgaaattccgcgatatgacccaaggcggcaaagccggccatctttttatcacggcagaaacactctacggcaccgatgtgcttttccatcacagcggtcatctcatccttgtccggcatatccaccggctctttgaacagcatctgaatgagataggagccgccgggctgggggccttttttgtcatccaggttctgctggaacacttgattgctcattcgatttcctccttatagcagtagatcatgcggcaatggacaatcactgctttgtgtgtggagttactccaaaaactaaaaaaagagccacgcaaaacagaatcagtccaataaaattacgctctatcagcagttttatggccatgagaagcagaaaaccgcaaatcagaataattataccgttcatttccttcattttcgttctttcggtctgttagcgaacagcttccaccggaactccagttctttctggacaaactctttcggcaggccccgggggttggcgatgagataccatacccgaaaggtgcgcttctccgggtctgtctcctgccggtagagctgatagcccgcctcatcctcctgcgtccactgtcctgtctgccgcttggcctgcacaaagggttccaccacccgatccagttcctccctggtgcggcttgaggcccaggcgtgatccacatcattggtatgggagaggtggaacaacatcgaacccatccagttctttgccttgtgttctggcgttccgcgcaattccgcctgacggcggtactccgccagctgttccgccgttccgtaccgttccaccatctgctcccgcacatagatgcaccagctgtagtcctccggctgggtaaagggggtgcagaccggctggagcgcctctgccgggtccgcctcaaagcggtcgataaagtcgaggtagtgggctttgatcaggggcaggaaggtgtccagcagcccggtgttcagcagcagatcttctgtgagcatccgaaagaacgaaccgcctgttgtcgattctattctgaaagagtagaggtagtcatctccctgcttaatgatacagctgaaacctacctccatatttccatggccgatttcgtagtctatgtagttgtagcggctccgctcaaaccagatctgataggtcagcccgtttttcattttctttttgaagtcgccctttttcagacgcttccagcccttttcactgaggttcagcccgttccacaggtagtccagggcctccgcaaagatgtccgccgggtgtttttgttccaccatatccccctcccaactgcttatgtctgtgcctcactgttcctgattgcatctgctaattgaccgctaaccgagtctatgtagagatacactccgtcccggtcgcagtggtacaggttggaatagctggtactcccattggggtggatgggattgggctccaccacctcagtggcttccagcaggccgactcctaattttatcgcggcagtgagggcctttttcagcacagcaagctgtccgttgctccaaagtccctccagatcctccagcacctttgggtcctgctccagatcccggagaagctgtaccacctgcttcggagacaggtacacaccggcacagtagttttcaacaatctgattttttgccggattgggaaaggctgctggcgccacctgtgcccacggggtgaaataccgggcatattccggcttctcctccaccagaaaggaaaatgcgctcccccgggtgtaatagtaatcccggaaaaagccctggatcaccgcaatgtaaaagccatggctcttatcaaacagctcgtctggtgctgtccctgccccgacccgcagggtatccagatatttttccgcatagaaatcctctatcccatgctgtgcggcaagggccagcaccttttcctcctgcccctgctggacccaggtaagtggggtaaaataccatttctgcatttcttccggcgaaatcgggtgaaaactcacatcgtatcccatacacttcctccttagtaatccagtaaaatgggaacctgctgttcctcggcaaaccgcatagcccgccagaacatggagaaggcaaacttggcaagagattccgtatcatactgggtgtgctccgggatgtccgccttgctgtactgtccattcgggcccacggtcccgtctaccgggtatccctccgtgtctgaccaatcaaggatggtgtcctcatcggcctgccacgccagctggttcagtttctccagctccttccgcagtccgcccaaagtggcaatcaaagccggatcgtcggtgggcaggggagccttgaataggaggggggcttccagcgggagccaccaagtggtcccccggaacagggaccacacccgctcctcatctgatgcaaggcgggcgaccagaggatgctccccaaagttccagtccttctccacggtggggggcaccggctcatcgtacgtatggcaggcggccaccagcagcatagcgccgaaggcgtcccaatcgggcttgtcggtgtagtagggtttctcattatcttcaggccagggggtgcaggggagctggcccggctgagaaatggcgctcaagatctgatcccgccagttctccaccgccgcctggatttcagctggggacatttcttcctcgttatcagcagcttctccatccggcgtgatccggttaaaggtgtatccgttttcctccgcccactgctgaacaacggttttccagttgtgggagtagtaccgggtcagcgtcccggcgtaaatgtcaagtcccataagtttttctccttttctgcttggtcaaagtcgttccagggtacagtcgtgcccggaatggtccgtatccaaaatgatttctgtaatggtgtccatagtctcttttccgagatcgcggacgcttttttcataggccagccacttgatgcggatgggctggccatactcatgccgcccaaaaccgccccggagaatatcgttgaaggcgttcaggttccgaccgatcttccaatccaagccgcaggtaaacacctgctccacctcgtcataaaaaccggccatgttagaaaagcggcggccgtcaatggtgaacatctctctcatgtccatataaacggctcctttaagtcatatttctccataatcttattttccaaggcttcataggcatccatatcctctggctgcgctggaatacccttttgccaataaccgttcccatagtagaaaaacatagcccagtaataaggcaggtcatggctgaatatcgccactcccatggcatcggccactggcgctgccagcggtgagcgttccactatccgggaggcttcctcataggagatccccaccaactccaccagcaggtgcttcaccagttcacagaagctgtgctggttgaatatgacctgaccatcctcatctttgaacacgatgccatctctcaccataatattctgctccgtttcttactcctcatccccggccttgaagttgtagatggggcggatgatcttcctcacctccgccgtggggccgatgttgtccagaatatcctgcatccccttgtaggccatggggcactcatccagggtggccttgctcaccgaggtggtgtagacctctgccatctgctttttgaattcagacaccgtgaaggattgcttggcatccgcccggctcatgagccgcccggcgccgtggggggcggagcagttccaatcctcgttacccttgcccacgcagagcaggctcccgtcccgcatattgatggggatgagcagctgctcgccctctttggcggacacagcccctttccgcaggatcatggcgtcggtgtcgatgtagttatggatagtggtaaactgctcctccacatggagcttcatgcctttgacgatctcatccatcatggcctgccggttgagcatggcgaagtgctggacgatcttcatgtcgtggatatactgctcaaacagttccccggacacataggccagggccttggggatactggtctgcttgaggtttttcagcttcttcagctctttctgaatctccttctcccggccctccgctttcattcgggcaatcagcgcctcgatggaggcatcgtcagtgcggttgagcaccttatagcccgcctcctggtaatagctggccacctctacacccaagcgacggctgccggagtggaccacgatgtagagatttccctcgtcgtccttgtccacctcaatgaagtggttcccgccgcccagggtgccaatgctcttttccgcccgcaacaaatctacatggcgggcacagcacagctcactcaggtcgatctggctgagatagcggtgggccttatcccggatggagaagccggaggggattttctcatagatcagcttgtccagcttctgaagctccagccgtccctcccggatgcgggtggtctccatgccgcagccgatgtccacgcccaccagattgggcaccaccttgtcggtgatggtcatggtggtgccgatggtacagcccgccccggcgtggatgtcgggcatgagccggatgcggctgcctgccgtaaattcctgattgcacagctcctgaacctgtgcgatggaggcactgtccaccacatcggtgaagatcttggcctcattgtattttcctttcatttcgatcataatttcctcgcaatattctatggggcgtggccccgtcaagtcatctcatacagcagggcagcgtcgccctgcaccagctccaggtgggagcgcagcgtttccagtccgctttgcaccgcctcggtgggcagatcccagtctggggcaatttcagcggccagctccggaaggttctgctcccgcagagctgccagcagtttagacgccggttctccctccagcagagcgcagtccaggggatcctccgtctggggagcaggaaaacgaacatccagatccagctcgctctcacaccagtcccagatggccatatagaccgcgccggagcagtcgccgttggacagttcctgccgccggttattttttatcagataaaaggatgcgatctgtgacatggcagctcctcctgaatattattctttttccatcagcccttcggcctgcatccggatcacatagaaggcccgcacccagtccagttcctgctccatagattcctccaaagccaacaggcggcgctttcccagcctgcggtccagaagggcaaagatacggacaaggggattctcgctgacgaggcttttctcgatgctctggttgtcaaagatcccaaacgcctcatagaacaccttttggtcaaaggtaccctgttccagcgcataggcatgagcccggtcgatggcctcttttgtggagtagtgatctttcagggttgtggaccgcagatgatgaaatttcgtccacacattctcaaaataggtgtagtagttgctccgcagcacttctacaccgtccatgcgaatggctgcccggccctcatggtcagcacttttgctgtaactggcggcaaaatactggatgtggtcccggagcgccgggcacaggtaatcattctctaatttgttgcggattccgctccaagttgacatgatagccgcctcctttctgatgccgctgtgggtaaggttgattcctaataaattgaaatttgaagattacatataatcctcgatatatgatcgttctataaattcttttactgcaaatatatctgcaaactcctcataccggggaaatccgtccacattatgtgctgagtaagtcaaatggaacagatagtaaatgtctcttcctattccgtttctgacaacatataacacatcatcattggattcacacttcgcaaccgcctggatttttttgccgtataagaagtggtcttgtcctatttctttgtttagttcagcaacaaatgccccgtccgcctgtgtgaaggggatcatataccagttaaaatctttaccatatttatcgtacagatcacagaacatttcttctaatgtcatttttccttcactcatttacggttcagcccccaactgctgcgctgtttttattgatcattgagatacctcgccaatttcttctccagcagttccgtcatatcattgcagaggcgctttaccttatcctgctcatgggcgtagtaccagatggtttcctctccgggacggagcaggagctggtcgccgtccgcttctttccagaactcgcccagcacacaataccgctctccatggatggtcagatgaaatgttccagagagttcaacgattacacctgtggatacattgatgcctgcggtcagcaggaagaactcccgcacctgggccggaagcgtgaaatccagcaccctttctcgtcctgcgatttgctcctctgtggcggcgggcttgatctcatcaaagaggttaagcacctttgccaatgccttggagaacttggggtatcggccaaacagttccgggtggctggccttgaattccttttgcttttcccgctgcactcgctcctgctccttgcagaacgcatccagctctgccagataccgctcctggtagagatcgctggcctcaaatgctgtgccgctcttttccagaatggcgatggcgcccttttggctgccaaacaccgggacccactgaaaaccgtgtcggcagggtttcagtttcagaaattcgccccgactcagcagggcttccaactccggctcgtgctcgttccaccagctccaccaggtttcaggtgtttcccgcccctcgaccaagtccaggagttttactgtcaatgattctttgttcataggtgtccacgctctttctccgccatcacttccacattactcagtagcacaaagctcattcatttttggaatcagtaatttatccatccactgacaaacaatctcaaaggtattgtcaattttttcttcatttcctatatcaagatatatttcattgtctcttaaactgtaaaacagtggttgtgtgttgatgtctgttttggcgtaaccataagggtcgtatggacgggtgttgattatatagcaaacctctatgcttatgctatcctttgtgttcccgccaaatgaggaaaacgcaatcatatatgtgaaatttttactgtgcctcgtaagtgttttgtcggattttttatacttaaagcctaaatgcccgtactttccttgcaacttgtttccaagcatttgcattgcttcgttaaagttcattgtgccccctccattttttacaggaaaaataaatatagttcatttctccgtttcagaggtcgcaggaatagatgctcatgaccccgtaatcggtgtgcaggacaagcccgctttgggtaaaggcaaaattcacctgcagcaccacaaaggggtcgtcaatggcagccagcagttggccgctgctggtatcccacagctctatgggagagttgccacgatcctgctgaacagccatcaggctgtcccttgtcttcaccgcgcaggtatctgaaaaactcagcccctgccggacagaaaatgggaaaggattggctatctcctctccggtctgggtcagatagaacttgccgcccaccgagaaaaactggtcatccggggagaaaaagggatgccagccctcattggagatcactgttttttgggcggacttcaaatcgaccagcacatactcaccctcggtgacgcggtaggccgctttgctctgccggggagagagcatcccgaagcagtaataggcaaaattcgggtcttttgacttcttgcattttaccgtttcccgccatatctctgtgttgctgccaaagtcaaagacgacgatctcctcgcctgtgtaccacagggccaggtcaccactggcatccagcatggccttcatgctgtttttcttgttggcaaagggcgtgatttcatgggtgcggagggaaaactgctccaaaagatagctgttgttcagcagcagagtatcattggggcagaggacctgctcataggtcatccgcctggcacccagagagaccgtttcaaagatctccccgctgccattgaagtaatagaggatctcgtcctcaaaatctccggccaccctcgtcaggaagaagtcgtcccgtgtgagggcggcagccaggggcataaaaccgttgctgtcctttccaacaaaccggtggcaccgcgcctgcccgacggcggcatccggattctgatagacaaatcctttccgcatctggcccatcatggcgctggccgccttgctcttgacctggaaggcggagtcacacaggatctccttgaccttcccgccattcaagcaggttcggatgatatgtccgtcaatttcgatccgccacttcttatttgtggcggggttgaggaaggttttttcaatcatggcttcgacctttcctcctttcggatcaggatgctttttccctcggcgttgatgctatacaagtcgtccagatggatgtggaatccgtcctcacgcacggtttctgccatacccaaagcggctttcgccaatagaagcagccccgcccggtttcccgttaattccaattcatttccatcatcatgggtggcaaaggagaggtgggctttcggttctaacggtaggatgggcagttgttcatcattgaattgaatggtcagtgttttggttgtcatcgtttgtatcccaccttttaaaaacttctcaatcaaaatccatccaaagcaggtgttttccgcagtggagacactggaacagatagcattgcaggtgcccgccattgacagattcccgaatcatttccttctgctcctcatcccacataggatcttccagcacatcttccatcacacccagcgcccgcagttctctggaacccacagggcccagataggcgcagtaatcgccgcagcgggcgcgccagtattcctgctgccagccggagtagccgggagtgcggtggatgagctcgtccagcttttcagaatcgtccacaccatcatccacagagaaatcgtcctggaagctgccgtcatatttccgggccgcctcgccgctggagatacactccgggcacagatgctcaatgtccttcacagcgtaaaagggggctgtatagaaaatatgagtcgtcttgccgcagcagtcgcagacaacgccatctggggactcctcaaaagcgccggtttccagaggggtggggtgataccggaaggtgggcaggcccagctgggcctgccgctccttctctttctgtttttcctccggcgtttttggcctggggagggcatagtggttgccccagttctccgcatagtccttcagcgtacccagccgcttgagggtctttttatcggaacgatttccaatttggcagagcagttcgtaggcgtccttcttaaagtccagcagatcatacacatccaccagcacttccttggcctgccggtcctcggcgtgttccaggtcctccttgaaggcatagagggcgcggacactgtccggatttccttctgtctctcgaaactgcttttggagttcaatatattgcttcaggtattcgttcatggtcaaaatctcccatcaatcccaccagaagtaccagacggcggactgtttctgggaaacgcaagtccgcttatcaagtctgtggggagggttctgcacggtccagaggagtctcattacatacacttactttgaacggtttgttctccagatcaaaatcgatcgtgatgcttctgctgtactgatccagatcattttcgatggtatattctgtggaaattccaaactctggatgatcgctgtatgtgttgggaagatgagtccaaccatcactggaaggatacctctcaatcaaataatcctgggttacatggttcagttcctgattatccaatttgatgctggtgtgtttctcatcataaaaaaccaccatggaatctaccacaccatcttcgattttttgagatggcgtatccgaccctgtggacacctggtttgtaatggtcacctctaacaacaccccgtctttttccaggagccggatgatggacccacccggcaggatctcctgcccatctttggatagggaccaatctgcccgcgtttcgtaatactcttcacccacgaacggctccaggaaatagggtgtctgcccgctgattttccaaccatcgtcggtcaactgcttcaaagaaatcgggatcggataataaacaccgttcactgtcagccccaattccatattttccggcatggcttcactctcctgttcatccggcatttgcgtgatgctctctgtgatctcctctgaagcaacaggggtttgggccgtgccgccctcccgcccgcaggcagtcagcagtaccaggaaacagcacatcatcagtatctgcaagtttttcataacgttcctcctatcgttgctgttccgtcattccgatacagcccatcaatcccaccagaagtaccagacggtggactgccgcaggacatccgccagattgcccacagtggggtcatcctgctcctgatccacaatgtccggacagaagccgtactgttctgtggcagcttccatggccctctcctcaagaacgggagccgggagcaggaactccagctcatcgtggctcatagcggcagggatggcgccatactgctcgaaccagtgtttcgccactgccatcagggccggggtgtcaggacactcgttccagttgccgaagggcaggtaggcaaagatctcccagggattctttaccggaattttggccagaatgagggggtaggtcatgtggctgtccgaatcccaatagcaggagaagcggtcattgtcatagccgccctccatctcgcccaggacttcctcctcccagtccaaatcgtcgtcctcggcttcttccctgcgctggccggtcaattcctccaaaaccgcctttccgtctttgacggaggtggagagcatcttcttccggtactcctccacagctttggggtcaaattcatagcagtccgcatcattctccgggtcggcgttcattaccaggcactccaacagcgtttcatcatccgccttgatgagcaccggcacaaagccttctttgacactttcccgtttggcatagctgtatgccgacataatggggtcatcatctgccatggatgggaaataggtacactcgcagtccagatactccatgatggcctgagctgcctgggaaggctccagcgtgtcctcatcgaagtcctgtccctgccagttggtgaagcgttcttcgatcacctctgccatagcctgatagtagtcctcgtcaaagggaatgaacaggtaggcttcatcctggaactcatcggagtgatatttttctgagccgaagtattccaaggcataatcatcaatatctctggggaagaatggactttcatgaccattggaatatgcaccataatagtaggaagcaaatgctcggccaatcttattgaacagcggacctatcaactgcccgtccagttcatcccggataaactcccgcagatctacgccagccggatcagccttgaccttttctaccacatcactgtactcggcaaggaattcttcgcccatcaggtcgtgctccatacaccagcgcaggtagatggccatgtggttataagcattgatggggtcaataggcagttccttctcctcaatgctctcaaggtgataggaagcgtcgtccatctcaccgtcaaaatcatcattggaaagggtgccacgggtgatagcattctggcgagtggggtttacgacaaaactgatccccctcatcttgttcagcagagcgtctgcatcatgttccagtttatagtccaattcatccacataaagaggaatgacctgatagaagttgacctccccgccgcccggcagggtgcagaactcgctgccgtcctccgtaccctggggatcgatcaggatagcagtgcacagtttagtgttttctgcaaagggttcccggttctccactgtatgaccatgccccaaccagctgtcacagttgatgggcagacgggccagggatttcagcaggcggatgggccagtaccacttttcgtctttcatggactcctgatccagcttccagtccgcaggcagagcgatggtaagctccgcccgctccagcttatattccgccagttcctccggcacattcatccggtgggcgcccatacccatggtgaccagagtgtagtagtcccgttcctccgaaggcggaacaacgcagatgtccacatggatgtcgggggaaaccagctcgtggaacacattctcaacattgccgaaatactgatcaatgtgcccctcgacggcctccatctcctcctcggtgtagacctcgggaacaccggtttcttcatcctcgggtgcttcatcgtccgggtcatcgtcagggtcaccgtccgatgacgcccaggagatcttcagggtcatctgctcctccggcagactgacaccggggctgcgggtgatggtgtgcttatcgtctgcagaaaagccgatagtctcgccatccttcagcatcacatcacacgccagcacataggaggcaaggcttgccaaaaagtcccgcagttcctccggctcggcgtcggtgttcagcacctccatttcctccttgccgaacacatccataccgtaggtgtagccgttcaagccgccctcgctccggtacaggccgaaccagacccagttgaagatgggcagttcgtcctctttgagcatatcggcaaagccctcatagaaacgaggctcaaataccacaccgctggtgtagatgccagtggcgtatttctggcggcagcaggcggccaccagcttggtgaagagcttacccttctccagaatcttttcctctttgcccagaatagccaccatgatatgggcgcggtgttccttggcaacttggaccgcatcctcccacatataattgttttctgcgttcagttccgcttcgccgttgggaatgggataggccgccagactgacagcggcgagtatatcacctacctcgaataccagtgcgtcgtcatccttctcctcactggcgtcgtattcatccacggtgatgtcccatttttccttcatgtcccggatgaactgctctttgtcccattctcccttggacagcagcacaaagccggtgaagacgcctgtgtggtcactctcgtcctcggtctctgcctcggtccgctttgcgatctcctcctgacacgcttggatcaccgctggggcgtcctcatcctccgggtccagctccgcccaacgctgggcgtaggggatggccttttcctcctgcccataaagatattgataggcataggccatccgcatattccactgggacttgtcctgtccttcctgccggacggactccagcgcctcgatggcccgccgcagggctttatctcccctatagttaggggtcccctcatcgtgatccccaatgatggcatagttttccagtgcccgtgccatggcataggcaatacgataggttcgccagtcctctgggacggcgttcaatgcttggatgcagcgggtgtactcatcctcgtcgttccactgctcgatttgtgcgaagaactcctccgcgttctctggggtgtaagggatatagtccatgcccgccagcgcctcgtccagctcatcctcttgctcctcagcgtccggttcctcctcgggcggtgttttcaggctcacagtaccagcctcccggcggaaggtgtggaagctggcccaggggatgtcactgtcctcgaagaaggttttcgccttatccagagccgcccggatgtcccaggagataaagtctacatatccgcagtagaggccggtggctccgccggtgagggtgagcacttccgggccgtccccggtggtgaacacttcctccagtttgtcccggaagtcgaagatcttctccgttccttcctcctcccgcagggtatccaggggatagcagaagaagcctgccaccgcgccgtcagcgtggagattgtccataaaatcattgtcgacattcaaatagccgttgatgagcggcacacagttggtggaaccggccatcacatccagccgccagtcggcttccgggtcttcattgggtttcatttcgtagccaagatagctctccagataggcatttggatcagtggagagggtcgctcccttttctttcagcatatcgggcagctgggacaggaggaaggacggctccgccttgggctcctccagcacattgaagtcgtcaatgtaccacatgtgggagatctcgcccagcacttggtcagtgagggtggtgagcatccaccaggcccggccttccgcctcccgaagcataggcagcagcttttcacagtaggcaaagatggcgaagctgttttcaccctgctcctccagccagatctgcacatcatccccagagatattccatccgtcctcggtacgcaggccgatgttctggaggggctgacggcccaccaggattttccagtgctccagcacctccttgggggcgtgcttctggaagtagaccagctcaaacagcttgaccttgtcgccctccggggtgaggatcagctcgtacttctcgccgttgaagcccatctcgaaggagatctcatcaaagatcagattcagggtttcttccatttgggccacgagttctgcgccgcgggtgtggtctttgtcgttgtccatcatctggcgcaattctgcttccatctcggcaaaggtttcccaccagttctctgtccgcgctcggaagcactccgagaactgcggcagggaaatgcccttcctgcaccagtcgatcaggtcctcaatgtcctgtcgggtgttgagcttaggatcatcaccgggatgcagttccagagctttttcaaaataccgcagagcgcggccctcctggtccagataataataggcataccccatgcggaaattccaagaataagtttctcccagttcctcctcgtgggacttcatcaattccagtgcccggtgaagcagcttccttccctccggctcattggggtccgccagattgttgtaggcccgggccagctccatatcgatttccggggtatgctcctcggaaggaatagcatccagagtgtcaataattttatggtgttcgtcgttttcatgccacttctggcactgcttcaaaatatccatatccgggtcctcctcgtcctgttccggtttccagtctttgatctgctggaacacgccattttcatcccgctcaaaggcgcagggagcgggtgtgcgtagcagcggaatgatgtcgggatcgtcgttgcagatcgtgttcagcttgtagattccggcattgttggggtcgtccatgtacgcctcgctctcgtcaccagcggtgaagcgccagccgctgtcccagccgccgtccggcttctcccgatagcagtagccaaccttgtagccctccaccgtgatgcggttggtggcgatgcagccatcggcgccctcccagtcgggaagcagatgtttcacatcctccgctttcacatggtagtcccgattgcggccagcggcgtcgtacagttccttccgcagggattccacatcccgagccatctcctggatctccccctcgtccatcatctcactgaggtcatattccagtgggttgtgcgcgaaatccgccaaagccttgttcatggcgtcatgctcccctggcgtggcggtgatgcggatacggcgggcgggggtgttgtactcgtccagatcctgaaggctcacactaccgctgacgctgcactccagcaggatggcggccaggtcggtgaccacatcaatggcgaagtgaaagtccatctccacgccattagagtgggtgaactccagatactccacggtctggtggaaatcccagttctgcttgtccagaccgatcttggcaaaaatctcgctgagggagatttccttctttttctgatcctctaaaaaggccacaaggttcaggctgtcatccgagcctccaataaagttgccccagtattttttgatatacatctgtcacgcctccttttattccggccactcatctccgtcacaatggccgatgaagtcataatgcaaactccattatttgtagtagtagtaccaattcccgccaaattcccggtcacattcctcctgggaggcaaaggtacagtccttgattccctcaatggggtaatggcgctttgtcagctgctctctgtgataggaattgatggtttccgtcaggccgctccgccgcgccgcctctaattgcgcgtcggtagcaaagatgtaggacacaaagtagttgtccggctggatgtaccagccaaactcaatggcctgctggatgtcagaaaagtggtgtttcacatcctccatgcaggcttctattactttttgccatgcgagctcatgttccttatttctcatattccgcctctgcgacacgggccttttatttctccattataggtgcggctgtcccagatggcctcaaattccgctttctctatggtgcaggcgtggaattcctcgccccagacatgggcgttcagttcatctacggtggggatcggcgtgatctcgatggcaccggcgtaaaggtcggggatgttgcgggtgtggccgtctgcaaagatgtcaatggagcgatgggccagccgctcattttcggtatccacttcatagaagatgaccggcggttctccctccggtgcgtcctcccaaaagagtttgatgtactcgatcattccatttccctcatttgaaccaatgccaccccgacatagtgccggtcaactcattcatctgtaccgcaatgtcataatcgccctgacagcccagcaaagctgtgggatgatcgttttccagaatcaaatcataaaactcaaccgctataccttggaattcctctggaatctccaacacagaaaagaaatccactgattgagcattttggaaaaattcaatggccgttttactgcattttactgttatccctttatgagtggtcaactctttcatgctttcgcagcctcactcatgttcagatacatccccatcgttttttcattgtcacaggccgcccggatcatcttggatagcagcatcaaatcatcgatatattgggagtacacgcagaacacatcttcgtcggagtcaaagtgaaacagatcctctccgctgttgttttcctcaaactcccggatcacgccctggaccagccgttcccagtctccgctgctgccggtcagtcccagccgtcggaattcctctgtccggaatccgtcgctgatcttcagcagaagggagatcgcataggggtggtggggaatgagaaaaaatggcgcgatcttctccggctccacccagattttgaatggcgggcgcggatcgggtatccatggaaggatctcccattcgctctcccgccggtttccgtattgggagaggtctttcatggcttcgccccctgttccagtctctttctgcatttctcaatgtgggcctgcttggcggccagaatctcccgcgccgtctccgcctccatccgcagcagtagggcaattttctccgggggcatcccgtccaccgccagcatacagagaatctccttctgcgcggaggctttgccggccgcgaagccggtatcatagtcgtaagacagcagggcaaggaattgctccggtgtcagagtggaaatcagttcctggtctctgtggcagatcctgctgcgaagtgattgtacttcttcctgtgatagtttagacatggacttacctctttccggcatatcatgaaccgatttgttccatatttgccgggcggaagatcctgcggcccgccagcagctcctccagctttttggccagcgcctccacaatggcgtggcatgggttttcataccccacgatttccagcttttgcagctcgacacagtggagcgttccatagaagcccagcatgaaatccgtcaattcagcaatcatctggtagccttccatgttgtctacatcggtctggccctctttggcggtcatcagaccgatgatccccaccgccacagtgaaagcgccgcagcaggactgttcagtctgcatcccaaggcccatgacggagaacatcttccgggtctcctcagacaaattcaggtggtaatattcattgcaggccaggaacatcgcctcggcgcaggtcagttccgtgccgatgtgatagtggttgaccagttcataaagtttcatttctgccatactgtactccaatcgcaaagcgtttcattctgtgtcacccggcgcagctcgtcccgcacctccatcagcgcaaagccaagtaggttccgtccccgccacttcatcgggtcctgggactccggggagctggcagggagccggatgccccagatggcatcgtaggggctggcctccaccagcacactgtccccggtggagaggagaaactcccgcagttcgcggttctggctgaatttgcaccagttgccattcagcacaatggcgtatttgaacttgtcccataccttctggtcaaagccccgcaccttgcggcccagggccttgatctgtttaggatcgctgcatttcaaaatctgctcccggatttcactatcgccaaacagctgggctttgcccgccatcatatactgctccatgcagagataggtgtcggcgatggaccagaaatcctccatccaccactggctgaggcagctttttgtcagctggccgtcctcggaaggctgatggccccagaacaggcacagctctcgcgttctccccgcggtaaactcctgctggagccactggcgggtgtactttggctgaccctccggctgccacgcatccaccaagaagtcaccatgctccagcacctcgccgctgtcctcgtcatcccaccagcccttccaggtcaccggctcgggaaagaggctgcggtattccgtccgctcctccggggagagggtgtccagccaatcgccaaatcggtatatggtttcctccccatagcccatgcgccagccaatggagtatcgctcgatctcccggtgggccagccaagggggaggcatgattttcttatcttgtagtgccataggggttctccttttctgttcagtgttatcgcagttcttctctcacatccagtggagcaccgtccaaggatgtgatctgtgacagctctgtttccgtcagatttttcaggaaaatgcagtattcgtccgggtggcctcctacaaactccatttttggcattccgatttgctgtgggtcggtgatccacaggcagggttctcctgtcgcccaaaaccgggtcagagtaagaatttggccgttataaataactttctgctccatccttatccctcctgcagcttcttcagcagcttcacgatccgctcccggttctttgcggttttcatgaaggtggggagatggtcagcctgggtcattttcgctcttcccatcggcttttcccgcaggtcggcgctgagatagtcgatcagataggcaaggtgctcccggttgagggcccagaccggcttaccctggaagaaggtcaaaaaccaaagttccaggccgaaccaggggtccttgccgccctgaatctccgcaccataggagaaagcctccaccgtcttgtgtacctcccccggcatggttttcccacagtagggacaggccacatggaggacgggaaagcgctgctttgcctcatcttcaatatccacccgatagtacctgccgcagttcctgcattggttatggacatcatagcggtagaccgtccgatcctgcgtcatccggtggccgcagctcaagcagcggaaataggcgtcatcctcatccgctgtcaccacacccgcgccatggcacttggggcattttacctggataccggtggtgaaggcgctgtaggcactgtgggtgaaatagggttcatcgatgattcggatcatagactcacatcctcaaaaatcacgaagctcatcgaacttctcaatcagggcatctttctggagcgtatcacccggcagggtatccagaataccccgcagggccatgtaaatttcatcccgctcctcggtttcgataaagcccatcttgttgaaggtctgggtataggctgtcaccgcatccagcgcctgggcctgggcgtcctcgcccggttcagcggccagcttcatcagctgggaacgggtcttgcggtattgattggctgcctttttcgcagcggaggcggggatatgctccgcaccgtcccagcctcggaatggattatccaggttttgcgccagccactccggtttccggggcttggtgatccgcaggtccattcccggcttgcctttccagagctgctttgccgcttttgccgccgtctccggcaggctggtcatccagaaccagcgaagctacggcatctgctccggggtggggatgtcagctgcgccaaagccgaacaggtcaaaggtggagaggttcgtcagttcctggaaccctcccacggcggagaagttccccaggtttcccggcgcaccccagagccgcagctccttcaggtggggatggaccgcagccagtccggtcagatcaaagtccttcagctggatgccatgcaacccccataggttcagcagttccgtgtgcgggcggtattccccgataaattggagggtcagaccgctgccgccttcgggggcatgtatggtacaggcgtccggccccttgttctggaataggagctgctccgttccctcacacagccacagttcctccagcccggtcatgtccagcatcagctttctgatgctggtgccccgcagatcaagtgtcctctgaccgtggttcagcaaagtcactttattaacaaagggattatcccgcaaaaactccagcagatccgggtgccaccgctggcagatgaggtcggagaggcagggcagcgcctttagttccagcgccgagtcgaatggctcgtgctggtccatgatccgatggctgctgaccttcaccgggataccgccgatctccgtcaccccgtcgctctccgcggcctccttgaagacccgccgccgctcctccgggatggcctgccaccggatctggagatacgcatcatagccgtcactccagccgccgtaggagcggcagggctggtcggtgaagggtggaagtgtgcccaccagcgcgtactggggcgggacctccatcggcacccgcagcaggtggaggtcacgggaccagtacatgaagtccttgtagagcgggcggagatggggtagttcctccgcagtcagaggggcgtcacccacccagtccagagagaggaccaccgcccagggctgcttgctcaccgagtccggcggcgcaatataggccatctggcaggcggtgtagcgtttcagatattggttgtagaccgtatagacctctccggtgctggctttcatggcgccacgctcctctcatccgttcttttccagatagaatccccatacgcagttggagaactctccagcggcgaagcgtcggatttgtccatcaatctctgcctcatagacatgaaatactttctccaggccgtaatgggggtctatcactctcgctgcctcatggcagttatgccagttgtaatcaaagatgtttacgccgaacaatttgcattgaccgtctgggcctgctgtttcaaatttccaagtcatagtttatttcctcacaatcctgttcgctgccagccgttcagccgctcctgcagtccgtcgatcctccagccctcgcccacacgcttcatgagaaagcggcggtcgaagccggtgtttttctctctggtgtagaggtagagcttgttcttggtgatctgctccgcgtccaggaactgctcccccttataggtgccctgggcactgtacgagaggcccaggggccggtagcccggacggggcttttcgctcacatacttctcccagatcgccagcaggcggggcacagcctcggcgtcttcaaacccggcctgctccatgtactgctcccattctgtcatctcggcaaagaaagcggacagcaccctgcggcattccgccgccgcctgctcatccagctggacgggctttttggccttttcccgctggagctgggagaagtgttccatctgctcctgggtgaactgcacatgggccaccggcttgatgtaattgttgcctgcgatggccagcaggccctcgtaggtaattgcggtatggtccatctggatgtgggagagcttggggatggaggccgcctgaagcagcccggcatcgtccagtccggtgcggttgagggtcagaaggtccagcttgccgccttgcagggcggccaggccgctgccgttgattccggcgttgccgtccagaatcagatagcgcagcttgggcatggcggcaaagaccggaaagcaggcgtcggtgagggcgccgttctctacaccgaaattgaccatatttttatgtccggcaaagggcgtcagcagttcatccgtcactggatagcctttcacatggaagcccaccagggtgtaaccagccagccgctccatgatctccgggggcagctccgggacttcaaactgcttctctccgtctaaggtcagaacaccgttttcccagtctgctgttctggcccgttttggtaattccattgcttacctccttattcctgctctttgtagctggcttcaatatcgatgaaccgcacatacacggcgcagacttcgcccttggcgtcgtagccgaagtagacgggatagtaaccgtcgccccagccagaggcgaagatgggcaggttgcagtcggtgtccggcactgtccagttgagccagtcgccgcagtctccctgatatttggggtgggctttggcgttttcctccagcaagtcacagaacaggtcgttgtaggggtcgatgtccggggcttcctccagccgcttggtccagtatgccttaaaggccgcctgggtctggatgtccgccacacagcccatcccggcgtctacgccaaagccgaagtagtcatcatctccaatcgccgcgtccagctcctcgctgcctgtcatacccagctcatagcggacaggcttttcctggctgacctccaccttgacgcaggcgtagcggtcgccgtatttctcactgggcaccacgcagatcttcacgggataagtcccggcaggaatggtctgtataaagggcggtgtatcctccagctccaccagcggatcgcaggcgaatatctgcccggtggggaaatggacggtgccgatgtccagcacatccacccccatgctcccaatcactttttctgtaaaatgggcttccaggtccgttttgcaggccagcttgtccttgatagattcgtatttgttcagccattctgtggtaggcatatcggtatctcctttcggtcccgggtccacccggatgatgggccggtaaaagtcatagtcgccgttcaggtcattgtcctcctgcacttccggcttgcagtgcggggaacagggcagaaaccccaggaacggccccagtccgccgcagatactgcgcccgccgtctccgccgcaggtggtgagtttgtcagcctgcaccacttcccgcatgtaggggtcgtaggcgatggacagaccgaagaagttgggctgctccatgtcatagggtctgtcctgctcctcatccatgtcctcaaaccagtgcaggcgcatggagtagtccagcccatctccccaggggaacagagtacggcacccgccgccgcacaggtaggcccactcatccgccgtaggcagtgaaagaccttgcttttccaactgttcaagaagcgcatggtagtctgtacggttatagatccagatctgaaagcccgtttctgttcgatctatacgggctgattgatgtaaggtaaggctgtcaaggtcactccaggcaaaatcacggaactgcctcagccagtcagggtgggcagtcaatctgggattttccatctgaaccggctcccagcaaagttcctccaactcccggcccaccagcatggggccgatggccgcctgccggacgggagccatgctttctccaatgaattctgccgggtcctgctccagttcccattcttgaaacaggtactctaattccgcccggctctcctgattcagtcccacggcaaacctgtcccagccaagggtaacggtatcaccgggaacaaagacaaactcccggccatccttcctgaagattccagtggtgcagctctggccccagcggtcaaagtgctctatccgcacaaaatccaggtggtactgctctgaaagctgctccatgagagcttgtcttttctcaggggagagctggtcaaactggggacgaagcagcatttttcccatgtccagccggttgtctgcacacttctgtggcaatttggattccttccctgggaggaagaagggcagattcggataagtttctgcatactcccgccagggctccagccttcggggcttgttcgccgtccgcaggaaaccccagaagtcggtggggtaacggaacaccggccccacgccattccgtcgggtgacgatgaccaccgttccatcggtgagcactccaatgtgctgcatcttttcgcctccgaacatccccggacggatgcgcagcacctcccttgtgctcatgttgataagctgggcaaaatcatcagagaggatctcgccgtttccctgcaccagcagccaatcttcggtaaaccagcgaagtttcagcccctctcccattccgggcaggtcggcgattcggcaccgcccggtgtccatgtccagctccagcaggcattccttcacccgccacttgccgctgacggcgtggatcatgtagatgcggcctgtgccgggaacgggaactgcttcggagaggtggtcgtatccgtacaaagggaaggggtgctccgtgaccttgccattttcccagcggtaaatgtgccccttgtaccactcattggaaaaatagatccggccaagcccgtccgccgtgatgccgcagtggtaggtgccgctccagccatccttgtgtagcggccagttttttacatcctggcaggtgccccggccggtcagttcaatccgtgtagcgttggtgggatcgcccacccagagggaatagtcggcccagaaaaaagatttcggtgcgccctcatatccgatgggggaaggctcaaaaaagtttagagtattggggtttttgcatagcaatgcctttccaatcactccacttgcggaggcccttgaagcggcatacagcccggtttgattcgaataggaaatgcacccgaaatggcatagactcatggagcgggtcagtttcggcggacggcagcgcagatctgccacacaaccatatttccattcctcggaatggatgcttttccattccccggccgcaaagtcccctgccagagaattgaagaaatagtcgtgctcggtctcaaggatgtattcctcgcagggcatcagagccccggggtcctgctctttggcatgggcgccccattttcgtccgggctgtttcatcaggcggcagtattgcccatgctttttacaaaagtgttccagttcgctgcgttcttcctctgggatcaggataaacagatactcgtcctctgcatccaggttatatagtgcccagccgaaggcggacagctcctgacccagagcgtccacacccttttcgtggggcagtttcatatactggacgccgacggcatcaaagcgttcctccagcagcatcgggacctgtgcgctccatttttctcgaagttcggccagagtgtcctgcacagctccgtcaaatttcagaatgtccagcgcgtcgtcgatctgttgcttgaagtcagccataagcaagtctcctctttttctggtctgctgggtacagtgacagccatatggtcaaatcgcggacattctccccacgccatagtcgtcaccagctcctttcgcagatagcttcctctttcaatctttttttaggtgtttaatgtactcactttctgagccgtcccagcagcagttcacgcaccggccattctgaaaatgatggggacaattcgggtagccatagagaatatgggcacattccggacacagccccatcatctgtgaggagcctttgaaaaacaggctgccgcactcatcgcaaatgaccagttctttttctgccatgggtatcaccagtctctttcccggatggcctcctcagtgtcaatggggatattgaaccactccagaatataggccacggctgccgcaatgcattcccgtgccaccgtttcgatctcgctgtcgttctcgtcaaactcctcctggagatcattgatgccgcagaccgcctcgtccagtgtctcctgcaccactccggtggcggtttcgccgctctccagcagatcgatgaccttctgaagctcgtcctttaccttgtccaccagaaaagcaggatagtaatcgtcctgatacatctcgtccagcagtttgtaattggggtcaaatgatttcataggaattgctcctttctcattcaaacatcaaaccgtatgattcggtgaggctgccatcatcctcatggaaaatacactgatacagaggctgacgctgtgttgctttgcggaaccgctccagaaccggagccagcggctcatcggcagggatgccgagagcatcagacacccgccgccagctgtccatatccatatcttccaagttacagttgcgctgtctctgcccgtattcctccagtgttttggaatctacatagtgctttgcgtcacagcagtcgtgccagcagatacagctcacgatcagggaaaagaggtcatccatgttctcggccagacggcctgcctcaccttcgctgctgtaatatccaatggagccatcttccaacaggtggtattctccgccggagccatccctggcaaaggccataccgggcagggaaaaggtgcatcggccttccgcgtcatcccgcggggataactcatccagcaggaagaagtcaaacagcgaatcaaattcctctgccaaatcaggggtttcacgcaatatcttcaaatagtccattgtcgttttcctccgtttacggttcttgggccattttgcgcagctgttccagccactgtgtttcttccattatctcatcgttctggtaaaagtggtctttatcgcgggccaaatggtcagcgagcggaggtgcatccagcggggtgcataccgtaaaactgtcccgatccgcccctttgatctcccggttgaggtagtacacccgcttggcatcgcgggaataccagtgcccaagtagttcccaggaagtcagctctgctttggaaagctgtttgccgtaggcatagatccgtttctcatccctggcaaaataggtgtcgcccaacgagaggaaagaggaaacttccgcgcctttgatgatcttcaccttgccgtctccgttgtggaagtagacctgccggctgtcctttgcatatccctgtggcgcgcccgaatcgttctggccattgtccaacacctggaaggctgccagctctgcatccgagattctcccgctggtggtgtagacggctgttttatccatcgcgtaggcatagtttaacacccgaaacgatgccgggtctgctccacgcaggcgaatcccgccgagaaagcaggccgtagaggatttgccccagtaacgccagcagcagaagtctttgggcgcaacacccttcaacaagccgttttcatataggccggagaagtaaaccgctccatccttgaggaaaaactcgttgtccaccggctttgtgctggtgatcggttggagcatttctccgtgctcggctgtgatactcaactcgatctcatcgtcgctatagatcaaatggagcccatgatgggcttttccatcaaaatgcagttcaatgtcatggtatttgagaattaagggcttcccgccgcttctcatcgtggaaacagcatcgggcttgccgaatatctccatgatctcatcctgtgacattccaaatttcaacggtgaaatgttctgaggattctgcaatatttgattgcgccaagtagtaaagttctgtttcatacttttaatagcactggaggaccagccatatccgatcaaagcggcgggctgccagatcctctttggtgatgtagaaatagatatgcccgcagtctccgaacatcaactcgaagtcaccctgctccacggtatccagctggaacagcagcatccagcggtcacgggccgtttcttccgcctgctgacgaacctccttggggatattgagccagccgtcgcccagatagtagccctgggataccaggtcgcactcgtcaaacatgctgttctggatcacatcgggccaacccagcagttgggagcggtcagccgggtcctctgcgtcctcaccggtcagttcctcccaagcatcgttgaaagcgtcgtcatcctcctcatctgggaacacctcgctgaagtcctgccaggaaggataggaggattttgagtccatcttgattttgaccatcggaaacttgaaatcttcctccatatccgccggaaaatcggcggaggacagcgcggaagtgtcctcaaaccagtagacacgggcacagccctgatccttggggtcatagccccagcactgggtatccgtctcatagaagaaggagagcaggccgtgatcgggcagaagatgctccttgtcaaactgggccagctccgcacagttgaactgagccaggaaagtgagaggacgatccttcaccacatggtcatagctctcgccctcataggtgggccaaacaaagtccggcggcacatccggctgcccgccgaagcgggtggcacccagcttgtatgtctcttttctggcaattttcagctgaatgctgtttctgcccaacgactccagtttttctttgatgctcatgtcagttcctccttgatgcgttctcacagctttccatccagtgcctcaaccgttttcatggcagcggaatcaaatctgcactgccgcagttcccgttcgatcagggcaaacacatctggaaagcactcgatctcatcctggtactcatatttcgcatacagtttcccatactcagagatccagacctctgccgggtagtaatagccgacgtggccgatgggctggcacttctgaccagctgcctgctcaatttccgccagctcacagccggacatatcccggaaataggcgtcctccaaatggtttttgattccgttgaccaggtaagggaacaaagcgaattgaaagtcagctgcccagttcagttttttctgttccagataccactcacagcacaggccgaaatacttgcggtaaaaccgctgggtggtcttcatcatcgggacaccgtgatcggcgtaatacttctccgcaatggagatgtccacttttcgcccttcctgccatccggcgtactccatcagctgcctgaccttgcttttgagatctccggagatggggatgcgttctttgatcattcaattcatctcctgtctgctgtgaatcaaagttcatgtggatacctaatcttatccaggcccgccttgatttcttcccattcgctgcgtttcgggttcaacgcagtgaccagttcttttgtcaccggaaccccatcagcaagctggcgcagagcctccaaaggcaggtctgctgggtaaaaccactttccatactccacataggtctgtggattgccatcaatcgtggagagcagatccttggatgcgtcctcgccgtccatgggattgcagtgccatgtggtgccatcttccgtccagacgcagaaggtgcttttcatctttttgacttcacggctgcccatgatcttttgtaaagcagagggcattccatctgtcaggtcttcgatacggggaagtttttcctcccagtcgtagagttcggaatccacaccgttgattacacagccttccggcgcaaacatgacgatcatgctctggtcactgccatcagtggcaaagaatgcctctttgccttttcgccatgcggggttgtatgtatagtggcggatgaaactccattcctcctccaccatgatgatgtccagagccgccagccctttacagaagtttttcaggcgctccgcattgggaaggccagataaatcttttgtggaaatcatgtgggtatcctcctgtctttcgtcaccacagccggtcgatcttggtatatatcttactgggttctctgtccataaaactggtcaatgagtcggtgggttctgcaagcggcatcacattcaaaatgtccagcacataataccagattcctgtatcccagtcccgaaaccgcccattgcagacagcccgaccataatcaccaggaatcaaacccagtgccagctcattgagggggagtttttgtccggtcttatcgtaggtatatcgctccggcatcgcaccaatatgccaatcatagcggtaacgcacttggattccggactcctgctgaatcagttcaaaagggtgaagccgcattgtgccattcggcttccattccatcagtctacgacagtccctatcgatctgaaatccatcgggcctctgtaaaatcgatacaaagtgtgttggcaggccaaaggaatagtaagagaagaagtctttcggcagccgcatcgctctgggatactggttccgctgtgcggccgcatttccgccccggcagtctttataccattgcaggcggatctgctgaaccagaagtgtgggcagatatttttctcttttttgttcctcagctctcatgtgtgatacagaaaatctccttgttcaagtcaaagtagaccaccatcagctcgtcggtgatctccggattgaaggacagatccataatgaaaacttgctgattcatctcactatccaccaggctgccgaaccgcttgagcttcaaaaagtccgccatctcggcaaaggacagcttggatggggcggttcccggaaaaagttccgccgcaatatccgggcctacatcgtcccggtggaactccatgaaaaatgtcacaacgctatggtagcggctgtcctcgtccgccagcgccgctttgatggcggatttggccttttccgccaatttctccgccttatccagcatttctcccaccgcatccatggcggcaggatcgccggtcagttcttcctctacatcgaagagaaagggcagtcccgattcctcgggaaagttgaagatttcctcgccgggggtatatgtaaaatccatgcgtttacagttcagcttcatctctgcgcctccttatccctcaatgttggcagttttgaggccctttttcaaggagccgtagaccgtcaccgcatggtcggtgaacatctcatcgcagtcaaaccaggcggtgaagctgccgccggaggtgacggacaggctggtcatgctgatccgccggacaagttcttcctctgtgatgggatcagtttccgggttgcgggcattttcattatcctgtgaaagccattcattagccagctcggtcaggttcttggccgcaagctcccgcatggccttgtcccaggtttcgcagtcggccagcagctttttggcggcactgcgggcgcgggtccaggagggcttgctttcagcattgacctccagagaaaggagcacatcctttccgcaccactggatctctccctcgaaggtatcatagtccttgtccagcttcagctcacccagcacctggtcctggatcaccaccggcttgtggtactcgtccagaacggcctgaagttccgggcagtcctcgtgggccttgaccacctgggagatacaccagggccatgccaccagatcttttgcccattcctctttcatccggcggatcttcaggcggcagatctgctcgttttgaaagcgttcccagcccttttcgctgttacgctcctcatcggtgaccggccactccagccgctcctctttggtgctgaccttgccggtgtcacaaaacaccacgcccagcgtcacaacggtcatttcccaaaagtttcctttccagttatatccgcccccaatgcagcgattgatcagagcgaccacttcctgctcctcaggctcgtacatctcatagaattcttcaaacatagatcattctcctttacagcagtttcagcactgcggcggcaggctcggcaaactccgccggggcctgctccaatatatcccggcaggccagcaccgcctgccaggagtagtaatagaagctgtaaaacaggtcatctggaaagacctcgtcctcctcgtagcgcatctcatcttcttcctcgtcgtattcctccgaccacaggtattcttctttcagcaaatcggagaagcaggggaggggagaggcgtgctccatctcatccccatcgtggaagcactggaggatgcaggcaaagaagtccagcagttccccagccaggaaatgggccacagagttttgtccgctctccgcgagggccttctccaaaatccggctcagaaacaccatgccgaaaggggtggcgtgccagagggtactctggtgctccatgttggtggtgagctcgtagagagactccttgacggatgccaaatcacgcatctgttccagaaccgcaaaatgctccgggaagtccgtcccccggccataggcggtggtgagccggtgccacgggatatcagcggccttgagatgggtgatgtaggttctgttttcttctgtcatgtcgctttcctccttatcccgctgtctaactgcggtattccttttcaagctgggtgtaccaccgtttcagcatggtctccagactggtttttccgttgcggtctgtaaaaacaaggaacttctgcatcagtctggggaatagatatttgcccgcttttgtcaggtcctgattgagatagaccatccgcagaatacggccctgccggtccagagggttctttttcaacagctccttttcaaaacagaagcgcagaaacaccacattctcgtcgtagaagtcctccaccacagccgcaccaatgctggtgtatgtgatgtcgtacaccaaacgactccaatcaaatttctcggcataaagaagtttcagcgccttctcccagtgttcctccggaatcgccagcatcctgtgctgggcggtgctggagtagccgcggtagacgggttccgggtgtcccagcagttcgctcacactgtcggcatagacgaagcacagttcctcatcgaacaggccgccgataaaattgccgttgccgtacagcatgaagtttttggacttggccggggaataagagaggttgtattcctgggagtccaggcttttatgtactttgttcagaaagtctatggatgtcatggccttgctccttattcctcaaactcgccctcgatcatcccgttcagatacctgccggggtctgtgatgaagtcatcccatttggccagagggtggaattcctcatgctcgatgtccagataccacagctttttgtctctggggctccacagcagcaggtagtcgctgtaattgtccatagcagccatcagggagagcagcttcttccgtttccaggtcatctcctgcacatccataaaggagtagagttccgcccacttcacccattcctgctccgggaactccagccgcagggggccggtcttcagatattccaccagcttggcgggcagcttatagggcatgagctgccggagcttttcctgctcgttgtgccattcctccggctccagcgccttcaggtagtcagccagctcctgatttttgttctgcaccgccacggtgtaaggccggtcgccgtatttgtcagcaatggtgatgtcggccccctgttccacaagccagcgcaccatggggagattcttatgccgagccgcttcggtgacagcggtggaggcgttcggaaacaccatgtccggcttgtggtaattgatgtctgcccctttttccagaagcagccgggcaagtttggtattgccctcggacacagcggcccggaatgcctcgccgccaaacttgtccactgtgatcccggcctgctccagcacctggatattctccgggcgcttgccccagcgcacttcctggaaggcccgctctttctgcttcgagctgagttttgcggcctgtccagcaaagagcgccaccacctccggcccacaacagcgggcggcggtgagcagcaggggctcttctaccgccaaatcgggatcagctccatgctccaacaggaaatggatcatgggcacatcgttttgaaaaactgcgatctccagcggcatcagcttgatgtattcgctgagctggatgggagtacccagatccagcccgccttgaagcattgcatccagcttgggaatatcgtgttcataaatagcggcggccgtttccgggagagtttcccagcggccaagatatgcaatttggtacataaggcacctactttctctatcctacaatagtagtttcctttatggccagattgtcgtaatccatggcgatcagcttcccggcagtttccggatcggccgaaggagcgaccgcatatacttactgctttttctggcaaaactctttcacataatcgtatatgctctttatcccgccatcggttactgtattaaataggccataaggttcgttttccaactccttttctgcaaggagcattgcctggcggaaattcccttctgcgatttcacacagtacgacattcaatcgtgcggtcggcgcagtatcatggagaatcttcgctttgaagtcggagactgtactgcatcggctatgatggtcttgaatggacttgttggaccggcaaaacgcctcattcatgaccaaggttgctgcgtccaccgtgaggaccggtagttccatttccttgatgatatgagcggaaggggaatgcgccgctgtgatatggaaactaaacggtttcttccgggctacctcacccatttcatatacatcccaaaagacattgtcaatgacgcatggctttgtggaaacgactgctcttatggcagtcccacacctgacagggggcgctgatagaaacacttcatataagaaatcacccaggaccttataggcgcagtctgaaaccacgttgaagccatgctctttggcaattacttttagatttttggaaatcatctcgcttaattccttgactgccttctgctcctgccgtgtcatactatttccacctcacccagctacaaaatggcctgttctcgctttacgcccttgggggacagttgttccaaagtcatcattcattttctcctatcccacaatggtggtttccttgacgaccagattgtcataatccatggcgatcagtttttcggcggcctgtggggtacacataaaccaggtgctcacgccccaggcgtccatccttgtgacggtgaaaaagtcggtttgggcagaagtaggttctcttgcgtcaatatagtagtcggagtagagatacaccagatccacctcccggtccggcagccacttggcccggcgcgcacggggcttgccgtttttcagcgttttctccctggggttctcaaaccacgccagttccttgaatttcagtccggtgaaggtatccatcagccgctgggcgatctcccggtgggtaaataccccgcagtcccaggagcccatcagccatgtctttataaagtcgcccaccttgctgccaggggcaggaggtccgtagacgctctcatccgcccacatgacttccatcttttcgcactgatccggtcgggggcaggattgcttgttgccatagcggtacatgatatttacatagccatagtcttcgccggttcggtcatggccgacggcgtctattttataagcggttatggacattacagcttctcctcgtccatgagctgctcctgcatctctttgggcagatcattccacaaaatatcatatgtaaactcccaaatctccgggtaacattcctgtgcggtctgctccgcaatatctccatccagatagtgcatctcctggtggaaaaaccagttgagcttttccatcagccggtagaggcggatctgttcttcttgggtcatagggcacctcctcgaatcatcaaaggatggaatggctgtacctatgccagctctgcgtccaaaatctggactggttttcctttctcgttcacatagtaaagggcgatatagtcgatgccgtcccgcttgacctgttcccagggcatccgttcaccgttgatcagttccacggtatctgcctcatccggttcaaatgttgctttttcatcctcatagtcaatgctgtaacccagctccagcaccagcttggaggctgggatctcgtatcgcgtgaggggacggtgctccaactgggctggatcatgttcatcgcagaacagattgtcgtagccatgccgtccaccgtcaaagatgacgaactcctcgccgctctccgggtcacgggctgccaccagtccgggagccgcatcgccatctacgatataggattggggctctcccttcaccgtgagcagatctccgtaataccagacctccagcagttcactgccggtggtggaacagagtgtcacggtgggcagacgcttctccgcccactctttcacatggccgatgagccaggtgggatatttctcagtcatcatagtctttctcctcctatttcaatttcagtacaaatccccagatgctcaccacaatcaagaggacacccagcagaaagaaaaccacccgccggtatcctctgctgtgtcgatgggcatcccgtgtaccggtggggtcgcagagccagttccagttgcagatcgctccaattaaaatcacggccccgatgagcaccgaggcaatgtaccaatgctcttgcaaaaatgctgtaatttgttcgctgttcatttaggtttcctcctcgccttcgtcgtcgcatatcacctcataccacgctccatcttctccgcgcatctgcatggtaccatagggcagattcaggagcgggataatgtctggatcgatgcggcagatgtcccgaatatcatagaagctgcagtgcgactcgtagtattcatccccttcaccgtacacatcgccctcgtccccagagtagaaggcccaaccgctctcccaacccatatcctcacgctcggggaacagccggtccatgatctgcaccttacacccatcctgggcgacgcgttcggaagcgtagcagaacaggggaccgtcccagtcaggaatgacagctggttttccttccgctgcccgcgccacccgctcctcggggtcatctgcaaattccgcttccagatactgctgaaaccgctcatccagcaggtgctccacactctgacggttcttttcggtatatggaaggagcaggtaggccgcttctttttccgcaatactgttccagacacggtatttgagcctggacaagacgatattccgacagtcccggcggtagacataggggttagaacggttgtcctgggcgtaccactgggcaaaaccggagcatctccggtcaaagaactgagtagacaatttcccatccaggttgtccaggatgaatacccgaagatccggcccctttccggactggaccgcctccacgatctcccgataccgggagaggaacgggttgctcatccggccccgcttgatggcccaccccagatagaaagccatcagattgcaggcgtccaattcgtccactggcaggtgaagctcctggatctttttgatctggtctgcggcgttgtccatctccgctgggtcgtagctgattttctctcggtcggtgaccacattcagccggtgtggattgatgacctccaggctctcgtctgggcagaggtccagcagggcatccgagccgtgctccagcttgtattggagctcctcccggtagagggggatcacctgatagaagttgacttcgtccccgtccggcaggcggcagaaaaaggactcctccccaaacacaccgggacagagcaggatctcgccccgcaggtccatattctctgcaaaagggataccatcctcaccctccataagtgtagttctggattccagccctacctccgggtcctccatggcgaagtgggcggtggccagcatcatccggatgggccagctccacagttcctcccggcagtccacctttgtcagcttccaatctcggggcaggttgatgagcagctccgcccgttccagtttttcctcccggcgctcctccgggaaacccatccgatgccggctcaggccgacggtgaccagcgtgtagtagtcatgctcctgtcggggcgggatgacggcgatctccagagggtgatctgggtcgctgtcgtccgtgaggagctgggtatagacgccgaactgctggtcgatatgtactttcacatggccgaggatgtcatcgtcggcagggggaatggtctcccgccggatgatctcctcccgctctttccaatccagttccaaggaattttcctcctccagatatttctcacagtcccgcaccagctcttgggcatccgggtcatccggggccagggacagccagcgttttgcgtattcataggcggtggcagcggagcggtatgccatcaggcaggaatagcccatccgggagttccagtaagggtcgttctctccctgaaggcgaacggactccagcagatcaatggcgtgtccgaggagttctccatccacctcaccatccctgccgtgggcgctgtgatcccccagcaccgccagattgctgtaagcccgactcagcttgacggtcagcagataaccccactcctgttccgggatggcttcgatagcctcaatacatcgtgagaactcgtccgcatcattccactggtcaatttgctcccgaaattttgtttcttctgtctgattcatcatttcaccgccttttctgtgtcatcctttgccttttttgaagtgtccgctgcctcgccaggtgttgaccacacaggtaaagatctgaccgcagtgtttgcatcggaccgtgtgagccataatttcgtctgcccatccatcctcagtctttaccttctccagcgaacaggtggattcctctgccatcagttcaaattggccttgtcccaccaactgctggatataggcaatacaggccagatagtccttgggggcatcaaattttctccatgtttgaatggttcggcagtgctcgcacataatggatacctcctcctgtaaacggttgttgtcagccctgtatctcagcgtcaacggggccttttttcagcgttccatccacagtgatcacatggccccaaaacatatcgtcgtcctcataccaggcggtaaaacggccgccgggagatactgtaaactcggtgagcaggatgcgccgggcaaactcatccttggtgatggggtctttctccgggtccctgtcggtctggtcattgtccgccagccactcgttggcctgagcggtgagcttttgggccgccatcgcccgtagggacttgtcccacgcttcctgctctgccagcagcttcttcatcacattggtgacgcgggtccaggacgctttcctttcgatctccacatccaacgagatccgcacttcttttcccatccacttgcaggtcccatcaaatgtgctcatctcacgatccagcgtgagggttcccagcacttcgtccttcagaagaacaggcttcgtgtactccgcccagagttcctccagtgccggacagggtacatcctcctccagcacttcggtgacataccactggggttcgctgagggcatcgcctttccagccgcgggctttgatccggtagatctggcccttggcaaaccgcttggaatagtcgccggcatcccgctccttgtccgtcagcggccagctcaggtagcattggccggagatcatctgtctggtctttacatccgccatggcaagggcgtgggtatgcgctgtccagaaagtatccagaaaggtcttgtccgcgctgataccgtcctgaatcagcaccagcttttcctcgtcttctggggcgtatagggcaataaagtccttgacttttctctttttcatggcgttctccttacgcaaatacctgctggtatttctctttcagttccttcggcgccgtcttgatggccttgctgccgccattttcagaggccgggccccagatagcccagagcaggctctgccaagcgatggcccggaatttcgggtcttcgttttcttccggcaggagataagcagaaaagcggcgcttaactgtcagcagcgcatccaggctttccacattggcaatcaggctgcggaattccctggcaggctccagccactgcatagataatgcgccccgcaccaatacccccagtgtccatggttgaaacccaaacttccggatcaaggcatgaaggaatttcccttgcagggaggagtgctcgtcgtcgcagagatccagatactccgccaccagtgtcgcccactgttctcccaccagccccagagcgaacacagcgaaagagccaggcatcgcacaggcttcatccgcgaggttttggtaccattcatactcccgcatagccagccgtgcataccgctcaatatcggtgtgtaatttggggtgctgcacagcgcaggcaaagagctgattgattcccttcctgggcaggccgggaatgggcagatagagtttgtcctttccacggaactccaccgagtaactgcggggaaattcctcctgctccagcaccgcacacaggtagtccaggatttcagcatagcactcctcggtggagtccctggcggtaatgcggatagcagcgaaagcgtcgttggccgacgcggtgaaatgctccgtcttacgccgctggatgtccttcggtagcttgccgctgccattggttttcagttcctttaccatgttgggacggagctgggaaaccagaccgaggatgtgtttggttttgagagattcaaaactctgtccatacactgtatggcagaccgccacatagcaggcaaagtgcagcagcccttcgtccacatcctccgctcgcaattccggccacaccgtgcagggcggaaacactgtaaacccatcttctcgctctcccacaaggaagtaccgctcctgcacctgcttttctatgtacttctccaactgatagcggatctcattccagcccgccaaccgccgcagggcatcgcagaaaataacagcttcctcataggggaatcccttcaaaggcagtttggacagataccgatccagcagctggctgggcagaaagggcgttccgctttggttccgaacgaccagcggggagccggaatggttttcttttgcggttccatccaacacatcctggatgcactgatctgcgtgtttcagcacttcggggtccgtatccggtttatggatcaggtaataacggccatttacgccgtcgcgtttcggtaaactcatagcaggctgcctctttcttccgggttcgccgttatcggaacaaaaatctgtgggtaaagttccttcagttcctccggagctgattccaccactttctgaccacccttggcgctggctttgccccagatcacatagcagaccgtttcccacgcgtattgcagcacttcctccgggctggattctgtttccagggtgggttcctcgtcatcatcgtcatcctcgtcggaggaaaaaccgcttggaacgatctcggacaggtggatttttgcctccagcagagcgtccaggctttctgcgtttgccatccacgcggcatagtccttggaatacttcatgttctgcatggacagcacaccccggacaaacatagggacggtatcggcggtaaatccgaaccgtttcacatacgcccggaggaatttttcctgtaagtgggagtgctcatcatcacagaggccgagataatcccataccagctgctgccactcttgccccagcattcccagggcgaacacggcaaaacttccggggagagcgcactgctcatcgctgagattggtgtactgctcatattgccgcatggcaagccgggcgtaccgttccatcagggggtggaggccggggtactgcacggcacaggcaaagagctggtttactccctttttgggcagtcctgtgatgggaagataactcttttccggccctttgaactccaccgcatagctgcggggaaaaacctcctgttccagaagctcacacaggtagttcagcacttcatggcagcattcctctgtgttgtccctggcagtaatacggatcacggcaaaggcatcgttggccgatgcggtgaagtgctctgttttcctcttttgcaggttgagcggcagcctgccggttccattttccttcagctttttcaccatatccggacgggctttctccactaatccaaagaggtaattggtgtccagatactgaaagtccataccatataccttgtagctcaccgccacatagcaggcgaaacgcagcagcggctccgggacctcctctgcacggatacctggtttcagggaatactcccgattccagaagcgatcatcttcattgtctgttgcaacaaaatacttctcctgcagctcccgtttgagcatatcaagtagatggtggtcaatttcaccccaccggctctggcggcgcaggttttcgctgaaggcgatggccttttccgcatccagggtctcggcccgctgtatttcggtccacgccctaagcagttgccacacctcaaagggcgcaccttgactgctgactactaccggcggccagagagaatcaagccgcgtgattctcccgtcaatggcatcctggatgcactggtcaaagagcggttgcagttcctcctgtaccttggtcttcatccagtaacagcgcccgtccgcactatttcgttttggtaaattcatttgatgcactcctctcaggtctgctggtgctgcatggatacgatctggcagtccgggcagaactccacatagagcgtgccctccgcacagtcaaacactgtatcccactggatctgggccagatacttcatgggcttcccacagtggggacaggtggtatattccgcatcctgcacccagttggcaaaaccgcccaccgtgttcacatcctcgcaggctgcgccgtaaaacaggggcacaggcgccttacccagcacgaagggattttcggtaagggccttgtagtcctccggatggacatagcagtccatcttctccgccccgtcaaagagctcggagggaaaaatctccacgccgccgtccaaagtgaagtgattgaaggcggggcctttcaaaaatcccacacagctggggcagcaggtggcggtcaggataccgtccagccccaggaaccggagccgctcatcccgtccgtccagcaccagcatatccactatgcgtccgccacagtgggggcatgtgtccttccgtgcccggccaatgcggacgggagacttctcaccgctggttcccttgaccatgggatagcaggtgtcaaagttaagttggattctctggccctccttgtcgaaggtccagccgccaatctgcgcatagctggacgggtccacatagaggcccttgcgccagggccggggattccgctccaactccaacaatgtctccattgccttttcatccccctggaaggcaaggcagcacatcaggttagacgcttcgctggaattttccgtggacaacagcgcatggatcaagccgtcccgcacatcctctggggcgcgatagtaaagttcagaaggccagaaaacctctgcggccagcgccgcccgctggatctccagagggatggcgtcccggcagccaagcaactgccaaaagtcggtgaattccgggtcctccatatcagccagccgctggatgttctgaatcaagtttctctgcttttcggcaatctgttccagcgtccaggccagagcagcttgtcgctcttgttcgcacttgcatttccaacatagtccctgatacccaaggagcgtcccacagctggggcaggcgtatttcagattcatattctcagactcctttcagaaaatagaaaaaacgccctgcgagaccctgtcacttggacaggctgacgcagggcatgaaaagggcgcaaagaagaagtcacatccacccacagatgtgattttctccataaacaaaatccatttttatatagaaacagagttatttttgactgattcgtgtgcatctcccaaaaacttccgcctgcattgcacatcattgaatgcgtaaagtgcaagccgttatcataaatgatggggtcaaatcgctcttttccatcatacataattgcatggaaattatcaactaaaacttatcattgcctttccatatgagaaagaggccgagatcgcggattttgaaagctgcattttcccatgtacaagcagtgaaaatgtgatattgtattcgcacagaaataacggggacgctttttaaatggtttttcggttggaaatgtggtcaaaaacgcttcctgcccgtggctgaaggtcatgcagcggcccggacagggagcgtttttgtatctctatgcggctgttcctgcgttgtaggtcagtcagaaaaaatgtgtaaatgattcctgttgtctgcaacgcaggatttgcaggtctataaacagggggagaagactcccagggatgccataaaaggctcggaagacaaatttcttatacaaaatcgaaagatgaaaccgaatgtgtcaccaattgcctctggtccaagtgatgatatgctctgccgtctcctcaattcccatcacagaactgttgatgcagaaatcataattctccggaaccccccaatttctgccggtataggtgtcatagtatttttttcgctgtttatcaatttttctgatggtgtcctccgcttcttttggcccgaggccctcgatctccatccggcgtctgatacgatccccgaagggagcgcagatgaacaggctgatcaccgggatgccggcagatttgaggatggcatcggcacaccgccccacaataatgcagggatctttctgggcaagttccaagatcacctggctctgcatctcaaacaggatgtcctccgccggctggcccttccgcacctgaggtccgccctcatagacgccggtaaagagccagggattgggtgctttttcctctctgcccgcaaacagttcctcccgcagttccgctttctgtgcggccagagtgatcagttcccggtcatagcacctgatgttcagtttctctgccagccgttttccaatctcccggccgccgctgccgaactgacggcccaaagcaatgatcggcatcttcatgttacgaatcctccttacaaatctgctccgcggccgggcgcggttccgtcatccgcagggtagcgccgcgaacatgatctttcaaaagctggtcggtaaaccggatcagctcttcaggggttccctggatctcgcccagcagccactcctcgatcatgcttgccagcgcccccacataaaatttcgtcagcaaatcaacttcgtcatcggatgcgtggtagttcagtgctatgacgatccgctggatcgtactctgtatgatagcgtgaatatctgtctgaaaaaagcgtttcagatgttcccggctcaaggagtgcagggcgcacaggcagaccgtccggttttcctgaagatactgaaagagttggagcaggccgtcctgccacagcatcacaccctcatgctcccgcagcagtgccacagcctcctggtcgaacatccagcgcactgcgtcgtagatatcctcaaagtggtagtaaaaatgctgccgagccatgccgcaggactgcatgatctccgcgatggtaattttattcagaggcttttgtgccatcaaagttttcagtgcggcgcagatctcccgcttggccgcctcgctggcttcgtatgttcgctgtctcatcccaacgaccacagacctttcctcgaattcttgattttattttagcacagatcccaggacttatcatagatgcagattaggagcaagtgtcagaaatctgacatttgcccctgttctgcatcttgttttccaccaagagattttttatgctgaaagaaaccaaaccggaaggagcgcggcgcgatgacagagcagtatcaagtcaccatacaggggcaactgggtccgcgggagggagttctgaccctcagttatcaggagagctacattaccggatcactggatctggtgggctatgtcaacaaggtgcagggcgtgcgggcagcggatgggacgctccatctctttcatcccatccaaacggtggtgagcaccattccctgtgagaccgttttaaaactgcaggcagggagcctgtgcggaacatctacctcaaaatccgcccagatgcggtgggaaggcgcacttctccatcaaggaccccgggaggcgtcggaactgtgagcaagggaacggaaaagtcatccttttttgagaaactggccacagtcatcgtcgacaaaagaaacctgatcttttttctctatgcctgtgccctgatcttctgcctgttttcccgaaactgggtcagcgtgtgcaacgacattacagagtatctgccggagaccacggagacccgccagggactgaccctcatggaggaggagtttaccaccttcggcaccgcccgggtcatggtctcccatgtgacctatgagattgcggaggaactggcggagcagatggagcagatcgagggcgtcacctcggccaccttcgggagcagcaccgtcggcgcggacacaggaggtgacggtgagccggagacaccggaggacatcatggagtatttcaagggggctgacgccctgatctccgtgacctttgacggcgaggaggaggacgagatcagcctcgccgccctggctgccatccgggaactgctggagccctacgactattacattgacagtgctgtaggcaactcacaggcggattctctggccagcgagatggggaccattctagcggtggcggcggtgatcatcgtgctggtgctgctgctcacctcccgctcctatgcggagatcccggtactgctcatcacctttatcgtagcggccctgctgaatctgggcaccaattttattttcggggagatctccttcgtctccaactctgtgaccgtggttttgcagctggcgctggccatcgactacgccatcatcatgctccaccgctttctggaggagcgggagtacgccgaggaccgggaggcctgcatcgcagcggtgagcgccgccattccctctatctctgccagcagccttaccaccatttcgggtctggcagctatgatgttcatgcagttccggataggctttgacatgggcattatcctcatcaaggccattctgttcagcatgctctcggtctttaccctgatgccgggcctgctgatgcttttttccaaggccatggcaaaaacccagcaccgcagttttgtcccaaagatcgaccgctggggcaagtttaccctgaaactgcgctatgtaggcgtgcccttgttcgcagcggccattgtggcgggctttctgatgtccaatcagtgcccctatgtctacggctacagtcagatccagaccgcccgacaaaatgagacccagatcgccgagaagaaagtcaacgagaccttcggcacccagaacgtaatggcgctgatcgtgccaaagggcgactatatcagtgaaaaggccctgctggagcggctggagacctatgaccaggtggactacgccatgggcctttccaatgtggaggtcatagacggctacatgctcacggacgccctgacgccccggcagtttgccgagatgacggatctggactacgagctggtatgtcttgtttatgccgcctatgcagcggagggcgaagagtacggaaggatcgtgggcggcctggatgactatacagttccgctgatggatatgtttttctttgcctatgacaaggtggaggagggctatgtagatctggacgaggaggaacaggcggatctggatgctctctatgaacagctttctgacgcccgagagcagctgctgggagaggactacacccggatgctggtcagtctggatctgccagaggagggggaggagacttttgctttcctccagaccatccatgacgaagcggagagatactatgacgccgaaaacgtctatctggttggggactccaccagtgactatgacctgtctgtgtcctttgccagagacaatgtgatgatcagcgtgctgtcggtggcctttgtcattatcgtcctgctgttcacattccagtcggtgggcctgcccctcctgctgatcctggtgatccagggcagcatttggatcagcttctccttccccggcgtgacccagcagcccatcttcttcatgagctatctggtggtgacctccatccagatgggggccaacatcgattacgccattgtgatctcctcctggtacaacgaactgaaggagaagatgccgcggtcagaggctatcgtccaggcgctggacctgtccttcccaacggtgttgacctcggggagcatcctatctgccgccgggttcctgatctcccagatcactacggagccagccattgtgggcatcggcgagtgcctgtgccggggaacgctgatttccatgtttttagtcatgtttatcctgccccagatcctgtacgtgggagacaagatcgtggaaaagacccgcttcaacatcaaagttccggaggtcagccacagcgccagcggcaccgtctatgtaaatggccgggtccggggccgggtgtccggtgtggtggacgcccacatccaaggcgtgatctacggagacgtctccgggatgctggagactggaagttaccagaccaaggaggttccaaaagcagatgaaacggaaaagcagtaaattcttgagtctcctgctggcggcggtcttgctcctctcccttatcgctcccgctgctctggccgctgggaccgccgataccatttatctccgcacggcagaggatctggcggggttctcccggaactgcaccctggacagctggtctcaggggaaaaccgtctatctggaggcggacattgatctgaccggcgtggactttgcccccatccctaccttcggcggcacctttgagggacagggacacaccatctccggcctgtccatcaccggcagcggcaatgtgcggggactgtttcggtacatacagcccaccggctctgtgcgggatctccacgtctcgggcagcatctctcccgctgaccgcaaaaacgttctgggcggcctggcagggaagaaccaggggaccatcacgatgtgttcgttttccgggacggtaagcggattggacagtattggcgggatcgcaggcatcaacgaagctcagggggagatcatcaactgtgctttctccggctctgttaccggggagcactatgtgggcggcattgccggacagaactacggttctatcatccagtgtgaaaacagcggcagcatcaacaccacagaggtggacacggaactggatctggacgctttgaatcgtgagcagctcaatgctgcggagaatgtacctgtgtgtactgacattggcggcatcgccgggttttcctcaggcatcctgcaaagctgcgtcaacaccggggcggtggggtatgcccatgaggggtataacattggcggcatcgtagggcagcagtccggatatctgaacggctgcaccaattccgggatgattttgggccggaaggatgtgggcggcattaccggacagttggtgccggaggtgcgtctgctctacactgagagccaggttggcgacctgttggatgaactggacgtgctgcgagacctgatcggccggaccaatgatgatgcccgcagcgcctccaacgagatctctgagcggatgcaggctatttccgaccgggcgggggaggtccagggggctatcagtgacttggcagatctcaccacagactgggccaatgaaaacattgatgcggtcaacagcatgtctgcccggatctcctggctcacggataaactgtctcccattatggaggatgccacagacgcgctggatctgatggagaagttggctggtcagatgaatgatgtgatggacgaggcgcaggaggccggcgatctggcccccgatgcagcggaccggtttgaggacgttatggacgatctgagggtcgctgcccggcatggccgggactcggcagaccacctcaaagcggctatggcgcacctgcggaatgtactggggaatccggatacggacacaaccctggcggaaatacaggcggcagtttctgaactgtccaaggatctctcggatattgacagctgttttgtacaaatatgggaaattttacagggtgcagatggtgtgcttcaggggaggccggaatgggcagctcttctggaaaagctgggggcgtttcagtctgcctgtgccgctctgccaaactgcttggaccaggtcaacgatgcgcttgctcaggtgatcgggtcggagaccgctgccccggaagcattggcgcagttgaaaagtgctgcagaggatctactggccgccggacaggcgtttgggcaggcgggggcggaactggccaaggcgctaatgaatgtcgcccctggacaggggccggatttgacagccgcttaccaaaaattacaggatgcgtcccaacagcttacagacacacaggaggaagtagaaaacattctgaaagatttaggcgcgtctgaagccgagcgggatctgcaggtgaaattggacgaactgaatgctgccatcgccgccgcagagctggccgccgcagaggcggaggatgccctcgcagcattggccgggatcgaatctgcccagactgtcgttgagacactccaggtcgaactggcggccatccgtaccagcctggagcgcgcaaagctatctgcacaggagatcgccgcagccgcggaaaaattggtggtgccttccatcaatatcgaggaattggaggccgccagacaggagatacaggccgccagggatagtttatcctccgcactgcgcgcattggcccgcagcgtggacagcggcgggagtgccgtccgcaaactgcgggaattgctggagaaggccggggatgccatagatgaactgagggatgccggagataccatggaggaactgtcttctctgacttcagacatcatggaagacctttcccatgtgctgcaagaactatctgagatgcccaccatcaccatccgtcccatcagcagcgagatcaaggaacagggggatgctctggacagtatttttactgacctgatcgacagcggagatgctcttcgggagtccatgtccagcaatacggacattttgctggacgatctggacgccatcaaccggcagttcggtgtcattaccgacctgatgcgggatattctggatggttctgatgagaaatttgaggatcggtttgaggatgtgtcggacgaagcgcctgaaactacagatacgggctatctctctgacgccaggaatgacggaacagtggagggcgatgttaatgtggccgggatcgtgggctctatggctattgaatacgactttgacccggaggacgatttgatccgggaaggcgaccgctccctggacttccgatatcagaccaaggcagttgtcgcatcctgtatcaatacaggagcaatcaccggaaagcaggactacgccggcggtattgtcggtctgatggacctgggacgggttagaaactgcgagaattacggcgctgtatccagcagcaacggcgactatgtgggaggtattgccggcgcctcctggggcagcgtccgggacagctggagcaagtgccacctgtctggcagggactatgtgggcggtgcggctggattaggggctaccctgataaattgtcataccctggtgaccatcgatgagggctctgcttatctgggggcggtagcgggagatgtggacagcgacggcaccgtatccggcaacacctttaccagcgagaacctgggcgctctggacggtatcagctatgccgggaaggcggagccggtggatttcgattccctgtgcagcacagagggcgtgccggagctgttttctcagctggagctgaccttcgtggccgatggcatcaccgtagccgtggtccccttccagtatggggaagggatcgaatccctgccggagattccggcgaaaaaggggtactccgccgcctggccggatctggactatacccatctgaatgccagtcaaaccttggaagcggaatatactccctatacctccgccctttcggacggtggggaactgccggagatccttgtggacggtagtttcagcagccgggcagaagtctcacacacgattgagaatgtgacctggagtgatcgccagggaaagacgcacaccggcactgcctataccgtcacagtggacgacccggatttagagcaggtgtcctatacggttcactaccgcctgccggactctggaaaacactatgcgctatgggtacaggaggaaagcggctggtcagaagcggattttgagatcgacggacagtatctgctgctcaccagtcagacggaggagatcattttctgtattacagagcggtccagcagccttcttgtctggctcgcggccggaacaggttgcctgttgcttctggctgccgtattctgtgtgctgcgtcacattcaaaaaaagaggcattgaaccccatgtatggtcggcaagctcacaggtgaagtagttacaaaagaagaactctatgaagctgcttgggcaacggactgcggactgtccatgagcaagtatgccgaggcttaccagattaaccgaagcagcgcagactgcctgcaaaggaagttcctcactgccctggcctgtgtcctgttcccggagatacaagcctttttcgagagcgaggaggggcaaagggaatttgctgagtggaaagcacaacagggaaagtctaagggataaaggaggcgggagtgctttatacactcccgcctcctttatccctctaaaataccaacgtgatttcttctgtaaataaaagccagtgttaaacaagcgagagtatatccaatgatggcaattaaagatgcctctataccaaatcctgctccagttaacaagatgttgtctgatggtataatgagttgaaaaataggttcgccataagcaccctccgatgttgtaatatgcagaatgtccgttactatcgtaaagttccataccgtatgcattaggatattgttaccaatagaatttcctgtataggaggcaagcgaaaacatagtgcctaccaaagtaccgctgatgattaaaagaaagacacctccgattgtaaaagtttccattgatgggagatgtgcgaaactaaacaaaacagatgggacaagcacagcaatatacttattccatttactttcgagcagtctcataatgaaaccacggaatagtatttcttccaatatccccgctttcaaagcaataagaatagatgaaatgataattaagaagatatcaccagtggaaaaaacatttacttgtgcccgtccaatgattagaaagatagtaactacaaaagcaggtaacaaaacagataaactaactccccaccatttaacggaaaatgaaatcccgaagtcttccatttttagatggagaacttttgttgtatagagccaaaagaagattagtgtcagcaacagatagcccggcattctgataataggatacaactcacggactggaagatttatgatagaaaataggaaatcaaaaattagacttcccaataaatcaccggccaaaaacagcaaaaaatatacaataattacggaaattgtctttgatgttgaaaacttataattcattctggtttcacaatcctcccaataaaatggtcttgtagagagatgttaaatgttattatagcatggggaataaaacatacaaggacagggccctccctgcccttgtatgttttaactaacatttcgatagaaatgataaatccgatcacattacccacttggacaatgtagttcagattatcattgtttggcccgagtggggagactcgaactcccggcatcttgctcccaaacgcttgaaccaaattttttgtggtgatttgtagtgcttttcggtgcttttcgctcggtatcagatattttttggcgcccttaaatccgctgtttccacgtgttccggccccgactgtggtcaaatatggggtcaaaaacgcttcctgaccaggggcggcaggtgtctgccagtcccggccgggaagcgtttttcgtgactctgggtttggagtattgtaactctggcaaggcgagtgtgcaagtcttttctgtttgacgggcatatcagtttttcacacgccgatacaaagaataaaagcctgctcagatgacctctttcagcgggtcttccacaatgggacaggtgtcatataacgtacaagggtccaaatccacacacgtgcagggatctcgattcccgtcgatatcccaggccactgtgtcattgatcacggtcagtctgtcacggaaaaaatctgcatcctgcaacggggcaaagactccgcccttctgcaccaattgagtggcatccagcaagcgaactgtaccatcatggaaatagatatataccgtgaagttcggtccggccaacacctggagaactttggggatcatctccattgcaaactcctttctcagacaagaggggcgatccggttgagaggcttagagtccttcgccaactcccaattttgcatcagttcatctcgatgcagttcgcaccacgccagaatcaatttcaactggcggaatggcaacgccccccgaatcacacaagcagattggatatctatcagcgctttgttaccggcatattctgcatgaaagtggggaggattgtggtcactgtaaaacatcgtgatccgaataccatagaataaactaatttctggcataaatagaatcctcctcttacctcttcgagtacattatagcaaacaaacacagcttttacaacggaaagccggtgtgctattttcaaaatttctgagtccgtttctcttatatcccgccacggtgtctgccaggcccggccgggaaaagttttcactgctctgggttttgggtattgtaactctgtgggagtggttaagcaagtcctttctgtccgacgggcgtatcagtttttcacacgcctatacaaagaataagggccgagaggcaatcccctacctgctcaacagccactgaatacccgcaacggttcgcttgataccctggacaaagtggttgccgggattcagccggaataccgtgtcgatgcctttgctctggtaaaaagcccggatcgtttctgtattttcctgaactgttttcagaaccggattgcgggttttggcctctttgtcccccagggagaagtagatgcagtccggcggtttctttggctcgtgggagaagatgtactccttgaaaccaggaaaccacagggagccggacatgcaccccacccgcgagaacacatccgtccggtagatggcgtacagagcgaataggccagccaaagagtacccagcgatcccccgccacgccggaggagtggctaagtctttttctgcttctggtatgatctcatccaccagcagccgcaggtaatcgtccgctcctccggtaaagggcgtccccttcttgaacgccgccggactgtcccacggggccatgtcgtggttccagtccaaatcactgatagcgaccagtgtaaacggcggatagccagcggcctgcgccgcctcaaacacctgttgcccctcttcggagtatgtgttcaggtagatcaccggaacgccggaaatgccggtctgaaaaatagacacggctttactgtctattgaaagggtatgcatgagggtacctgcctcctgtataggccaataatttaccaaaagtttcttctgcggccattgtactgtaaattgataggctttgcaatatcaaggaaggagtggacgtccgtcagcagatagtagatgaccagttttctggctccttgctttccctaatgaaatctgctaaaattatatacaacactgtcagaagttgttgcgagcctcggcagtatgaccacataagtcaggtgctctgccaggcggtagagcatttttcgtatcttacacctcagaaatagaaagtgtaatattgggggatctatatgggaaaggaactttttaaaaatattccaagcaaagttgaagatctggtcaagggtgttcgcaacgggcgcattggactacctgatcttcagcgccccttcgtctggaaagataataaggtccgcgaattattcgactcgatgctcaaagggtaccctatcggctatattatgctgtgggagtctcctgctgattatgagaacaaaaaaagcaccattggaagtaacgccaagacttatgaaacgccaaaagagctggtcatcgatgggcagcagcgcctaactgcccttgttgcggcaatgtttgccgtcaaggtaaaggacaagcattttgcggaccgcgaaatcaagatctcctataatcccttgacgcaggaatttgcagtttggacccaagcctttgagcgagacgccgagtggatcagccgcatcagcgatgtgtttttggcaaaagaggataattccattagcacgtttcgaaggcgtttcataaaagaggtgaatgagagccgcaacaaaaaagagtcccgctccttactgacgaggaagaagaccgaattgaaaataatattaatgcccttctgaatctctctgattattccttgcctactctggagatcagctataccgccaatgaagaagacgttgcggatatttttgtccgggttaattctggtggacagagcctgacagaaaacaacttcattcagacattgatttctgtatacgaaaatgagaccagcgataaaatcaacgcatttgcagctgcttccagaatcccagcagccaatacatcctacaacaccctgatggcgattgaacctgctcacctgatccgaatggctgtcggcgtcggtttcagacgggcacggctaagatatgcctacatgcttttacgtggtaaaaatttggaaaccggaaagttttcagcagaagttcagcaggaaaatcttcgaattttcaaggatgctctggacaaggtcatgaacctaaacaactggcactctttcgtcaatattgtggcggaagcgggatacatcagtgagaaacagatctcctcaaccaacgccgttgttttcagttatgtgctctatctgattgcaaagtatgactataaactggatgcttcacagttgaggaaatgtatcagtaaatggttcttcatgagtaccattacttacttctataccggctctacggagtctgaggtggaaaagcagtttgctgatctgcgagatattcacactgctgacgaattcattgcgtatattgaccaagttattgatacgcattttacggatgactactttaacctgacgcttcctaacgaactgaacagcgccgcagcgatttcgcccgcttggtatgggtacattgcggcgcagattgtattgaatacgccgatgctgttcagcaacacccccatctcgaaatactttgttctgggtgccagcggaacaaagaatgcaatcgacaagcatcacatcttccccaaaaaatatttgacagatatcggttacaccaatgaccgggatcgcaatcaaatcgcaaactttacctatctggactatgcgacaaatattgaaatttcggatcaggcaccgaaagactatgtcgcttactaccggcagaagttgggggaagatggctaccggaaagcctgcgaggatcatgcgctgcctgtcggctttgagaacattgaatatccagaattcttaaaacagcgccgtcttctgatggcgcaaattgtgcgcaaggcgtatgaaagaatcaaataatactacaaaaagcggaggaccaatagtggacaccgaagaattgatgatcgaattcttgaagcagaaacaagtgattacctcactggagaaggacattctggatacctatcacgagctccagaaattccccttcgacgcaaattctgcggaacagaaaattatttcaaacaatatcaattacccaaaaatcgccttgaaagttgcggcattacccagcactgtgcagaaacccagggagaagatcacggaggtggatctgcgatacattctctcctgtcagttagctggactggtggagcaagaaagagaagtgataaagcatggccaataagctggagctgacctgggttgggaaggatgagccaattcgtgtggaaccgcggctcttgattgaaaacgccgccctctctaacactaccaccgacccaggcacacagaatatgctgatccatggggacaacttgctggcgctgaaggccctggagagcaaatatgccggacaggtgaagtgtatctatattgacccgccgtataatacgggatcagcatttgaacactacgatgataatctggagcatagtcaatggctgaatttgatgcggccaagactaagccttttatgggggctgctatctgatgaaggtagcctttggattagcatagatgatgatgagcaagcatatatgaaagttctttgtgacgaactttttggacgcagttcctttattgcttctattatatggcaaaagcgaacatctcctgatatgcgagcgattattagtgacgggcatgattacattcttgtttatgctaaaaacagggaaatgtttaaagaaaatcgaaacaaacttccgttgactgaggaacaagccaaaggatacaagaatccagataatgatccgcgcggaccatgggcatcctctgatttcaccgcccagggttggagacccaatcaaatgtatcccattactacgccttccggaaaaatagttactccgcccgaagggcggtgttggcgacatctcgaagatgtctataaacaattacgacaagagggccgactttggttcggtaccgatggatctggtgttccacgaaaaaaaacatatctatctgaggcagggggaattgtaccttggacttggtggcctcataaagaagttggtaataaccaagaggcaaaaaaagaaataatagctctttttggggcagcaaacgcctttgatacacctaaaccagaaagattgatagagcgcgttctacatattgcctccaaccctggtgatctcgtcctcgactccttccttggctccggcactaccgccgccgtcgcccacaagatggggcggcggtatatcggtattgaaatgggcgaccacgcctacacacactgtaaagtccggctggacaaggtgatcgccggcgaggatcccggcggcatcactaaggcccagaattggcagggcggcggcggttaccgcttttacgaactggctcctaccctgatcaacaaagacccctttgacgaggatatcatcaatgaggcctacaatgtgaatatgctggcagcggctgtggccctccatgagggattccgctatcagccggacagcaacttcttttggaaacagtccgtgggaagcgaaaacagctatctgttcgttaccacccggcatatcaatcgggcttatctggactccatcaagggttctatggaggacggcgaatatctcattatcgcctgttgttccttcgacagtgggctggacaagacctacgagaatatcgccatcaaaaagatcccccagatgctcctggaccgctgtgagttcggcaaagccgactacaatttgaacattgtccatccgccggtatatgatgacgactgggatgaggaggactgcgatgagtaattctttccctcaatacaccacagactacatcagtggtgtcatgtcccttcgcaagccacagacagagtctctgaaaattttagagcaaattctcgatcacgttcctctgcgcaagggcatggatttagaggctgctctggatacagtgcatagcctattccccatctgttcagattttgagcgggatttcatgtctctcacctttgctttggctactggcgtgggaaaaacgcggctgatgggcgcttttattgcctatctttatacacagaaggatatcaagaattttttcgttgtcgccccgaataccaccatctacgaaaagttaaagcgagatttgagcgatgtcaatagttccaaatatgtctttcgagggttgggatgcttttcttcaccgccgaagatcattacggatgacgactatcgggagaagaatctctctttgtttgactccgacgtccatatttacatttataacatcgataagttcaacaaagagggcgtcgaaatgaaaaagctgaatgaaacggtcggaggatcgttttatcaggctttgtccaacctgccagatttggtgttgatcatggatgaatcccaccactaccgcgctgagaaaggggcgcaggctctcaatgatctgcatccgctgctgggcttggaattgaccgcgacgcctcttgttgccaaggggttaaagcaggttcccttcaagaatgtagtgtacgagtatccgctctccaaagcgatcgaggatggttatacacgaactccctttgctgtaacgcggacagatatcgacttttacaattttggcgatgagcagctggataagctgatgttgacggatggaattgcctgccacgaaaatgccaagcggaagttggagctctatgcagccaacaacagtactccggaaaagcctgtgcgggcggtcaagccattcatgttggtggtctgcaaagacacgcatcacgcagctcaagtggaacagtttgtgaaatcggatgccttccgaggcggctcttaccgcaataaaaccctcgtcattcactccaagcaaaaaggtgcggagtcggaggaaaatatgcggttgctgctggatgtggagagcccggacaatcccattgaaatcgtgatccatgtcaacatgctcaaagaggggtgggatgtcaacaatctttatactatcgtcccgctcagaacagcggcatccaagatcctgcgcgagcaaatggtagggcgtggcttgcgattgccctatggtgagcgcaccggagaccggaatgtagatgcggtaatgctgactgcgcatgataaatttgccgatatcctggcggaggcccagagaggtgactccatcttcaaagccggaaatgtgatcaaagcggaggaaatcgtaccagagcaagtcacatatacccaactggccctggatttggagccagataaagcgctggatgaagtttatcagaagactggaattgagaaagatgcatctacggatgccctgctcaaaaaatcaaaagataaaattcggaaggccgtgacagatcggattcagtctgacccgtctcataaagtagatcttgaccaggcaaagcacattgttgagggggttcaggacgagctctccaaagatgaagatttagggaaagtctttgaaaagaatcggatgccccttaccgcctggatgctggattatacagaggaaacccatcgggcggcgcaggcaaaattcattcctatcccgcagatcaaggtaacggatgccggcgttgaagaatatgtgtttactgacttcaatttggatctatccgactttcgggatgcaccaatcaaaaatgagctcctgctgcaaaacttagaggacccacaggatcggcaacgtatcaagggagatgctatcgactttgaaggctataaccccaagaaagtgatcctggatcggctgcgggaaaaacccgaaatcgactaccagcggtgctcaaacttgctcttcaaactgatcactcaagtttgtgaccattatgagactcagtatgggtccaatggtatgcaaaacattgtgatgatgcacaaaattgatattgctgatcgaatctacaagcagatgatgcagcacttttactgtgaaaatggtttcctgcaggaagaagtcattggaagccgaaactataatctgcagcagaagtatcaatctaaagtgacagtcggtttattcgatgatttcacggaagatattcattccgtactctttacaggaattaagaggggtgtcttcgagtctgcgaagtttgacagcaaagagggggaactgaccctggcccgcatcctggaaaccgaccccgatgtgcagaactggttgcggccccatccaaaggagtttaacatcacctataatcatggtcacaactatgagcctgacttcgttgtggagacggaagatcgaatttatttggttgaagtcaaaggtgaggacaaattggacgatcccgatgtgattgccaagaaaaaacgtggtatccagtattgtggagtggcttcacgctggtgcaaggccaacggctacaaggaatggcgatatgtgtttatcccgtctaagcagatattaccaaactcttctttcatgcaactcgttagaaaatatcaggaattataattttactttcatcagtaagaatacctgagggctggtggtttgcgatggatagcagaaaatatatgcttctggtcaacggccaggataagaccgactccgtcgccagcttccgttttcagaacggtatgtgcgaggtaatctatgccaattctccaaagtcctatcgctaccatgccgaaaaagtacagcttctgaaggtacagaaccggattgatccatctcaggtcatcattaccgtggacggaaatcctctttcgcaggttgatatgattctggattttggccccttttaccgttttctccgaacaggaaaaaaggcccttacatacccaaaaggccaagtggaactccagaaaaactgcctgaagaaccaggagcaggcgggcgtttttgaatacttcaaagaaacagcagcggcggtcagcctggtagccgaaggtggcctcaacatcctgagcggccagtatgagcggatcaaaagtgtcagcgacgtaaccgtgctgtcctgctatctggattcttcccaaaagcccgcagtgcgggcgctccctgaggcagtcatctatccctttggtctgaaccaaagccagaaaacagcggtggagaacgccctttcctcccaggtcagcatcatccaggggcctcctggtaccggaaaaacacagaccattctgaatattatctccaatgcggttcgaaatggtcagacggtagctgttgtctccaacaataactccgccaccttgaatgtggcggaaaaattggagaagaaggggctctcgtttctgactgcttttctggggagtcgtgccaataaggagcattttctggaggcacagaccggccaataccccgatatgtccgcttgggttctggagccggaggagaagtcacagctggatcaggaggtgaccgtcctctctaaagaactcagtgagatgctcaacgcgaaaaaccgcattgccgccattgagcagaaactcctccaactgacgccggaacagcattattttagtgagtactacaacacctatgcccaggcaccaaaggatgaggtgaagggtctctcctcccaaaagattttatccctgtggttagagtacgagcagcatgcccagcaggagagtaaattgggtctgctccaaaagatatccattctctttcgcttcaatcgcagtgcgctgaaagtgttcctccagacgccagaactggtgattccgtacctccagcggcaattctatgtggtacatcgacaagaattgacggaagagcgggctcaactggaggaaaaacttgagcaatatgcatttaacgaaaagatggcagaactgacggaaaagtctctgcggttgttccgtgcggagctgagtgaaaaattctattggcaggagccacgtcaatgctttgagatgcgggattttcgcggaaagtccagggaatttaatcgggagtatccagtgatcttaagtacgacctactccattaaaggcacactaagctttgagcatatttatgactacctgatcgtggacgaggcatcccaggtagacctggccactggtgtactggcttttgcctgtgctcgtaacatcgttattgtgggagatctccagcagcttcccaatgtactggacagcaaaaacttccaggacagcgaggcagtctggtcgcggtattctcttccagagatctaccatttttctgcccacagtctgctctcctctgccattgccacatggccggaggctcccacggttctcttgcgggaacactatcgctgccatcccaaaatcatcaatttctgcaaccagaaattctacggtgggaagctcatcgtcatgacagaggaccatgaagagccggatgtcctgaccatgtatcggacagcgcctggcaaccacgcccgtggtcatttgaaccaaagacagatcgacgtgatccggcaggaggtacttccaagtctggcgatacaagggtatgggagtatcggcatcattacaccatacagagatcaggtggcggcaatccaaacacagctgggcaaggacctggaagtggctaccgtccataagttccagggccgggaaaaggacgccatcattctcacctcggtggataatgttattaccgactttgtggatgaccccagaatgctgaatgtagcggtatcccgggcagtaaagtctttagctgtcattacctcccaagatccaaggaacgatcggactaactatggtgatctggcccgctatatcgagtacaacaactgtgcggtgatcgagagttcggtctactccgtttttgacttgctctatcaggggtacgctgagcagcggcgggcttttctgaaaaagcatgggcgagtttcggaatatgactcggaaaatcttctctatgctgtgatccaggatgttctccagaaggaagagttttcttttgtggactgtgcagtccatgtgtcgttggtcaatctggtgaaagactactccatgttgacagaggaggaaaccgcatacgcccgcaatcccctgacccatgtagactttctcttgttccgcaggatggacaagtctcctctgctggcagtagaggtagatggagttgcgtttcatgctgcaggaagcacccaggcagacagagatgaaaagaaaaaccgcatttttgatctgtgcggtatcccgctgttgcgactccggacagatgggagcggtgaaaaggaacgaattgagcaggggctgagggcaacgatctccataggccgatgaatatcaaagttcccttgacatcacgctgagaagaggaaacacaaaatgaacgtcatctgcttcggcgattccaacacctacggctatgacccccgctcctatctgggtggccgctatgatccggacagccgatgggttgacatcctggctgtggaaaccggctggagtgtctgcaacatgggtcagaatggccgggagattccatctgcggcccccgccttccctgctgatactgatttgctgatcgtcatgctcggaaccaacgatctgctccagggtagaagtccggagcaggccgctgagaggctggagcggttcctctctggcatccccttggatcgaagcaagatcctggtgatcgccccgctgccggtgaagcgaggcgcgtgggtgccggatcagcagctcattgacgattcccgtacctttgcccggctttgtcaggccctggcggagcaacttggcatccgctttgccgacgctggaaagtgggacatccccttggcctatgatggcgtacactttacggagcaggggcacagagcctttgccgccggacttctggaggaactcaaatgaaacgaatcctgcctgtactcttatctcttctgctgttgaccgggtgcggcggaaactccgcggatggctaccagcaaatcactcaggaggaggccaaagagatgatggacacccaggaggtcatcatcctggatgtgcgggagcaggatgagtacgacagtggccatatccccagcgcagtgttgttgccagtgggaagcatcgacgaagacaccgccgccgaggtaatccccgaaaaggattccacggttctggtgtactgccatagcgggaatcgcagtaagaccgcctccgccgtgttagccggccttgggtacaccaacatctatgaattcggcggtatcaacacctggccctatgagatagagtcgtgaggtactaccaaggaaattgaagagcagttaaatgacaggggtgagcgccacaatgtatctgctcactccttgtcccgttgaatccagatccgagagtttcattaatctcgcaccgagtttgaccgctatggttttaggacgaaaacgaacgcgagaaaaaatatccggtctcctctgagtataagattggatgatcctggttgttcacaatcctttcatctggtataatatgttgcacattagtttgaaagagaatttctgccttagaaatttatatgtaacgatacaacgctaaaaacagaggagagagttttgtggatgaaatcatgaaacttgatgattctggagaaatttcagttggtgacaccaacattctcgaactcaccggtgatctcctggctgatgctcgtgcggatctgaccaaagcaactacgctgagtgtccccattgcacaactggccacattaggggccggggtggcctcactggttcctgcactcaacacggtaacacagacgattagttttgatacatctggattgtatcgcatagccaatcaagccgtgggagacaccttaaagattgctaagaatgggaactcctggggtgctttaaaaaccgcagatggtggttcaaagcttgcccagcttcagtctgccggccccctaaccgcaacatctcagtcagtcgccgccatcaatccagcaactatgatgatggccgtggccctgttctccatcgagcaacagcttggcgaaattagtgagatgcagaaacagattctatcttttctggaaatcgaaaaagaatctgaaatagaagcagatgtggaaaccattttcagcatagcatccaagtacaaactgaactgggataatgaacattttgtcgccagtaaccacaagatggttctggatatccagcgcacagcacgaaagaacatgctgagctatgagaaaaaagtcagcgatattgtgagagggaaaaagctgattgttgcccatgcgcaggtaaaatctgcattacaagatttactgaagaagttcaagtactaccggctatctctctacacgttctccatgtcctctttgatggaagttatgctgggcggtaacttcaacgaggaatatgtctctggtatcaaagatgagatccgtcagatgtccgaggcctaccgagacctctttgccagatgctctgtatacctggaaaacctaagcagctcatcaatagagaaaaattttctggctggtattggaactgcaggcaaagcggtgggcacattgatcggcaatattcctggcattaaagagggaccagtggacgaattcttggtcgaccagggttcacgtatgaaaaaaagcgctcatagtatgcaggcccagtccatcaaagagtttgctgaaatcagcaacccccaaacgggcgtctttattgaccggctggaagatgtcatacggatttttaatcacacagatcaaatttgttttgatcgtgaaaatatctacttaatgtaagcagtacaaaatctacatcgcctatacaaagaataagggaccgactttacaaaaggcggtcctttattctttttcttgtccgtggttcaggagttcttcagccactccacatattcctccagggtgatgacctcccggtcgcatttctttttcatctctctagcctgctcgctccaggcatagaactgctcgtcggtgatacggccggccttgatccaggcaaagcgcttcttgtactccttgcgataggccttgaacaccggatcgtcggactgcttcttggtccactgctggaaggctccggcctcccggcaggtctgctggccggaggccaccggacgctcacagtactccgcgctgacccggccggtctgggggaaccagcgtccgcagttcttgcaccgccggacagtgatcccacgctccacgcagctgcgcagggagtagtcgatcatgtccgaaacatggaggggatacagaaccggcgaacaccggcccggctccaccggttcaaagctgagggggatgggccggaaggagaacagagacgggtccttgggcgcatcatagagatagtgggccgatgcctgctgttgaggatcccgccctgccttgtccacatccagaacgagatcaaagaaacactgtatctgctgctgatacagcgggagctgttccgggaggccctgcagctcctcaagcatctcctgatcctccctgcttccccggtcctgggtgatccccatgcgtccaaaccgctcaaaccagcgcacatacagaagatgcaggtagatgtgtcggctcccaaggtcacccagggccatcaaggtacggccaccggcctctttatcatcccggtcgatcaaaagggaccagttctcataggccctccgcagcaggggctccagctccttacagtcggtctccagaaaagacagcaggctctccaggaacgggaattccttgtaggtcgagggaacgccctgaaccccgtggctatcgaattgaaaaacctcttttttctcagagaagtacatcttggcataccacatgtcggcaccctccaaaatagacaatcataaaaaatttatagaatagacttgacaagggggtagattcacgtgctacaatactcccgcaaggaactgtcaaaataatcttacaatagtctaacacccacaaatccgattgtcaacgagaaactggtcccaaacattcggaacggcaccttgaaaaatgaatacccatcaccagagacgatactccccagagaagtaaggccaggacgttgtcacagagcaccgacaattgagcgtaccaaggggaagaaaacgctgtgttagtcaaacaaggccgcagggcaggaacgggtatggtgcatggccagagagctcctcaaagacagttcctgtaaaaaaggccgccgaactgctgcaacagttcagcggcctgccgcgtttcggaaaacacagcctgatctgtgtcccagtttaacagagagacctccgaaacgcaagaaattttttctctgaatttgaaacatcggaggtactaaaacattgaaactgtctgtctacaaatcctacgacgatctgcccctgttcctcaacgctaagatggtggcgcaggtactgggcgtgtccatctccaccgcctacgagctgctcaacgatcccgggttccccacgctgcgtgtggggagccgtatggtagttccgaaagagaagttcatccagtgggcggagggacagtcgggaggtgtgaaatgagaaaacagcacttgcccaagcgggaccccatcaagaactacttccccctccccaacgagatcttctccctgggactgtccgccggggcaattgcagtctacggatttctcctccaccgggaggaccggaggacctaccagtgtgtggccagctaccgaaccatcggagaagcggtggggatgagcgtcaacacggtgcgcaagtatgtgaccgagctggaggaccggggtctgatccggacggagcgcaccatcgtcaccactcgggacggccgcaccctcaacggatgtctgcgttactacatcctgcccatccagatgtccatcgaacagttctatgcgcggcagctccacgcagctgatctggcgctggaacgacagagagcggaacaacgcatggcgtcgctgaagagaaaggagtgtgcatccggatgctgatgcagatgatcgactgcatgatcgagcaggacccgtctctatcagcacggcgcaccatagacatgcggcggtacattgtcaaccggtggaaccgtacgcacgaggatcctatcgacgaagatggggtggctctgttcctctgcgatgagagccgtggaaccctgacagatgaacaaagactctttgcgagagagtgccgtgaggaaatcaaggcctgctatcgaaatgcggtgttccagatgtttcagtgcggcgagatgatgtaccggcatctggtgtccggtccggaggaatactgccggatctttctgccgcagcacgccgttccctgtggaaagcggcttcccccgtgtaacggcctgtgaggggctgtgtgccctctttgggggcggggcggagtccctgcccccgaggaggccttcggagcggatttggcccgttgttccaccgctgtggaggaggcctatccggggaatttgtcgccccgtaactgatttacggaggacgaaagaaaaagcaggagaaagccctggcgcttttatggcgcctgggcggtcacttccgcccgcagtgcgggcggtttccggggacggaggctgacgcttctccgggtcggcaaaactgcgattgacgctgttttcggaaaaacaggcgaatatccccgctgttgagggatactcgctgacgctgcgatagagtttggagggatttgacgatggatgaaaatagacaccggcacaccgtttggatggatgacgatgtgtgggatcaggtggaatcccactaccaggcggacaactgctccaccagaaacgaatttattgaaaaggccgttcggttctactccggctatctggacgcggaatctgccgatgcttatctgccccgggtcctggccgacgtgctggatggcaagctgggagccctgggcaaacgggtaggacacctgctgttcaagctgtcggtggatcaaaacctcatggggaatatcctggctgccgacatagagatcgacccggatcagctgcggaaagcccgggtccgctgtgtcaaagaggtaaaggagaccaacggtgagatcagcttcgaagacacggtccgttaccaaaagggggctgagtgatgccgggactgatccagaagtcgggctacatcaagccgggaaacagcggcggtcactacgccgagtacatcgccacccgggagggtgtggagctgatcgaggctccgcccccctcacatgacggcggcggctacctggagtacatggcccagcgcccccgctctcacggcctgttttccgccgacggtcccgccgatctggaacagaccatggaggaaatcaacgggcacaccgggccggtgtggaccttcgtctactccctgaaacgggaggacgcccaccggctgggctatgagaacagcgaaagctggcgcaggttattgctggctcatcaagcagaattggcgacagcgatgaaaattccgccaagcaattttcgttggtgtgccgccttccacgacgaaaagcaccacccccacatccacatgatggtctggtcggcggaccccaagcaggggtatctcacggaaaaaggcatcgagaagatgcgctcccagctgtccaatgagatcttccgggacgagctgctgtccctctaccagaaaaaagatctgtcctacagccaagtgcgggacgcggcgatggaggccatgggacggctcatccgggagatggagacaggcctgtgccacagtccggtcatcatggagcagatggagacgctggccgggatgctggagaaccacaagggcaaaaaggtctacggctacctgaaaaaaccggtaaaggcgcaggtggacgccatcgtggacgaattggccaaggtcccggaggtggcagagtgctatgaacagtggaatcagcttcgggacgagctggagcgttactacaaggatgcgcccagagagcacctgcccctctcccaacagaaggagttcaaagccatcaagaacatggtcatccaagaggcggagcggctccggcttagcacgtttaccttcgaggatgcccgcgtgaaagaggaagtggatgaggaccaggatgcggtgtacttcgcctggaactccaactggcggatggccgaaatctaccagcgtgccaaggaagtgctggaggagtacgaaaatccagaggaggaaaaagcggagcaggtgcaggtgctggaacagctctggcagagaggtttctccatggccgcctaccaactgggcaaatgctggcgggacgggcggggcgtccttcccgacgatcagcaggcggaactgtggttccggcgggccgcggaagcgggatatgacttcgcccaatacgcgctgggaaagcttctgcaaagtcaaaaccgagcgggcgaggcggtatcctggtatgaaaaagcggcggcgcaggggaactcctgcgccgcctaccgcctgggaaagctgtatctggaggggaaagatgtcccgaaagatgtgccaaaggcggtcgcctatctcaccgactccgccgaacacgggaaccagcacgcccagtacactctggggaaactgtacctcaccggccaggatgtcaaacaggaccgagaacaggcctgggcgtatttctatgaatcggcggaacagggaaacgaatacgccgacctctttctggaacacttcgaccaggcgcgcaggcccaatgtgtttctgtcggccacccggctgctccaccatctgagtcagatctttcatgacaactcggtaccccccgccgccccggtgggacagcgggtggaccgaaagctacggcggaaaatccgggaaaagaagatcgccatgggccacaagccggacgaccatgaggaaactccccagcaaaacatgggcggcatgactatggggtggtagcaatcgccaacgaaaccgcagtaaaaaatgctgttgaattttgcagcagatcgaggtatactaagggcaagaaaggggctgaataccatgccgaacatcaaacccatctctgatctgcgtaattacacggaggttctgcatgacgtggcagttggcgctccggtttttctgacgaagaatggccggggccgctacgccatcgtggacatgcaggactatgagcggacacaggccaccctccggctgatgaacgagctggccaagggccgcaagtccggggaggaaaagggctggttgacgctggaggccgtagaaaaacatctcggaatcgcagatgaataacctgcatttatccgacgaggcgcaggctgatttggccgggatcaagtcctatatcgcaaagaatttggaaaatcccagcgcggcgatctccacggtacggaacatcacaaaggacatccgcagattgcgggagcacagtctgattggcgcgtccctgtcctcgattgccgatgtcgagagtgactatcgtttcctggtgaccggcagttacctcactttttaccgagttcttgacaacgatgtctatgtggatcgtgtactctacggccgccgggattatcttcgcatcctctttggagatgtgcaggacgacgaaacaaacgaatagagacaatcttcttcatagggagaaacgatttgtcaccggaaccgtctgcagagatgcaggcggtttttctatggcaggcatatcaaaatctggaccgcaatacaaagataaaatcctgcccgcagatgataactttctgaaaatagttgaagtttggggtggctattgggcggaagttcgggtattgtgtgttgctgacaaaggaggcggcacacatgcgagacacactggaaaatctatactttggaaatatcacccccaacgatcaaatcgtcaaatcggggactgccctgaaaaaagctatggaacagtcggcggagtgcgaggagaaactcaccgctctgctggaggacaaggaaaaaacattgctgctccggctcatcaacgcggagaacgagatcggcagcaccatggccctggaaaacttcatcttgggtttccgcttgggagtacgcatgatcttagaggccctggacgaggacgacggcagtctgatcgacccaaataaggagggatagcctatggcaaaacgcaggccgtccggcgacggcatggttcggaaacgggaggacggccgctgggagggccgcatcgtggtgggccacaagaaaaacggcgaacccatcttccggtatgtcctggccaaaacccagaaggaactgctggacaagctccaccgggacctggaggcctttcaggacgtggagctcaccgaggacagccgcatgactctgggggagtggctggaccggtggatggaggactacggcgcggccaccctgcggcccaacaccctgcggagctacgagcagttcatccggtgctacatcaagccctatctgggggacaagatcgtctcccgggtgacccgcatggacattcaaaagctgtaccgaaagctgaaacacgaaggccgggtccgcgaacacccggaatacgggcacgagctgtcggacactatggtgctccgcatccacgccatgctccaccggtgtctgaaggacgcggaagcggcccatgtgatcgcccggaaccctaccgatggggctgtggtgcccaaggccaaccatcgtcccaaacagattctcacgaaggagcagatggacatcttcctggcggcggtggaccgcaacgagatctggcgggacttcttctacacggagctgaccaccggtctccgccggggcgagatctgcggtcttatgtggcaggacttcgacgagaaggcggggatgttaaaaattcttcggtcggtgaatgtccccaaggccggggaactggagatcggcgaaacgaagaccagtcagggacggctgaccatccgcctgccgcccagcaccgtccagcggctgcgggagcggaagaaacacgccgtcagccagtggatcttcccggaacctctggctccggagaagccggtgcgccccagcgccgcctactactggatgaaacgcattctaaaggacgcaggtctgcctgcgatccgatttcacgatttaaggcatacctttgccacccacgccctcaccagcggcgtggacgccaagaccctgtccggcatcctgggccacaccaacgccagcttcaccctggacacctacacccatgtgacgccggacatgcagcaggaggccagccacatcgtgggcggcttcctggaagatctcctggggaaagacctgaaaccgtggcagagagacacgccggagggaggtgcccgccatgggtaagcggcggaaaaagggcgagggctccgtccgccagcgcaaggacggccgctgggagggccgggtggtcgtcggctacgacgaaaagggcctgcccaggacgaagaacgtcctggccaaaacgaaacgggagtgccaggaaaagctgaagcagctccgggagacggtgaccggctccaagacagagaaggtccggccggagatgcccttcggggagtggctggacttctggtatcagaactatgtgaaacctcagatccgccccactacccaggccaactacgaggcgaagatctatcagcatatcatcccggagctggggaagatccccctgaaccagctggcccagaaggacctccagcagttctatgcccggatgaaaacgggcgggcggctcatccgcacagagcagttcggcaagggcctctccgactccatggtgcgcggcctccacgccgcctgccggtccgcactggagaaggcggtgcaggaggaactgatccgcaccaacccggcggtgggctgcaagctgccgcccaagcggggccgggagatgcaggtgctgtctccggaggaactccagcggttcctcatccaggcccaggcggaaggttatttctaactgtttcttctggacttatgcaccggcctgcgccggggcgagctactggccctccagtgggacgacctggatttcaaaaccgggaccttgaccgtgaacaagcgggtctacgaggtaaagggacagctccaggtgagcgttcccaaaaccaaggcgtccattcgcagactggtcctgccgcccggcgtggtggaggtgctgcggcagtatcagaagacggtggactcccggtggatgttcccctcgccggtcaaagaggacatgtccatgacgccaggggcggtgcgccggcggctccagatcattctggagcgggccgggtgtaagagaatcagatttcacgatttacgccatacctttgccaccctgtcgctggagaacggcatggatgtgaagaccctctccgccatgctgggccatgtgtcggcggccaccaccctggacatctacacccatgtcaccggggacatgcagaccgaggcggcggccaaaatagaccggggactgggcaacgaggtacaggaggaatctgcgcagacagagcaaaacccggccgcagacttccagccggtgctgagaaagacccggaagcccggcaccgggtgcatcacccagatcaatgatcatctgtttgagggccgctactcccccacctggccggacggcaccaagcattccaaatgcgtctacgctcacacccgggaggaatgtgaggcgaagctgaaggtgctgatccagcagatgaacacagagcggcaggccttgcgggaccatgcacggggcattactccgccggataagctcaccaaaacccaaaagaagatctggatgtacatgaagttccaccccgatgtgaccagctaccgggccatcgccagaggcgccggggtgacgaggcacacggcggcgaagtggtatgagatgatgcgggggatgctggggtggacggcgtaaaaggcggcttaattatctattttatcaaattctccaattcatcatcaaaagtatcattctgccttgcggagcgccgccaaatatcgtatgatgagtacaggagatgccgggggaggtgctgaaattgagtatccaagaggctctcatcacgatgtttaccgacgatcccatcaactggctcaaatgggcggtcgtgtttgcggtcctgatcggcggctatgccatcgcggttccgctgtacaaaaaggcgtcccacggcatgagctgggagcggaaacgggacatcgcaaagagcagggaccacgtcattaaagcgtctctggtggacaagcacccctccggcgaggtatcccgccacaactggcgcgccgtctaccgttacacgattgacggcgaagagcggcagtatgttgcccatttcaagcacccggcaacgccgcccctgtacctgtatctctattacatcgataatcccggcaagctgttctcctgcgaggagtaccactatgaaaaccacaaggggctgctcctgtttccagtcatttttctgccctggatcctggccggccttgcccttattctcctgggcgtagacctgtcgggattttaaaatagacttgtttcccggacgctcaaaagggggtggtatcacattttgataccacccctttttgtaataagtaggatctcccacagcgatggataccgcaatagcctgcactcgctccaacatataaagaaactctatttattgagacagcaacaccggtaaatctccatatctgctatatctcatctttactatttagttgtcctccaatttagcgagggcagcgttaacctgatataatcaagataattctacgttaatccgcaaaaatattgtcacttccatactcttgtgatattattcaaattagaaaattatgtgtttgtttgaaagcggggagttttcatggatctaaatgttgaacgatggtactctatgaaagaaatcgccgaatatcttggagttagtcgtgacactgtgcttaattggatcgaaaagcgtaagatgccagctactaaaataggtcggctgtggagatttaaaatcagcgaagttgatgcatggatgaaatctggagaatctgtaaaatgatgtcgtttgaggtgtggcatgggatcagtaattgaaaacgcaaaaactaaagaaaagtgtcaaatttttaccccagatgatatcgtagaaactatgctggatcatgtaggatatattgactctttatacggcaaaactattttagaaaattcatgtgggaatggtcaatttctaaaaggaattgttaaacgatatattaatgattgtaaacgaaaaggcctttcaagaactaaaatcaaaaatggtcttggacgcgatattttcggcatagaactggacccatcattatatcgagaatgtatacaaaccctaaattctattactgatagttttggattaaaaagagtttgttggcaaattaagcaagcagatgcgttgagagaaccttattcactcacatttgatttcgttgttggaaaccctccctatgtatcttattgggatttagagaaatcggaacgtgaatacatcgagggaaaatataccacttgtcaatatggtgcttgggattattcttatgcattcctacaggatggttttaaccatttaaattccgcagggaaaatggcctatattatcccgaatagtattttcaaaacgaagtctggtcggagtattcgaacgcttttgcaaccctacttgacagaagtcctcgattttacaactacaaatgtgttcgaaaaggttctaacctctccagctatcattattattgaccgttccacgagaactgaacagattgtatataaagatctttctgcgaatctggaatctaccgtaaatcgcgaaacccttaatgatgagtggctgttcggctgccaagaacaggcccctggactgcaacataaatttggtgactactttagagttgctacaagtatagcaactcaatgcaatagcgtctatgttcttaccaactactctgatgatggtgaatatctgatatgtgagggcagtaaaatcgaaaaaagcgttgttcgaaaagctgcaagtccaaagggaaaagctaacgatactacagaatatatcatttttccatattactattccgatggaattctaaagcactatgacgaggttaccttcaagcaaaaatttccttttgcttatgcttatttagaaagcaaaaaagaaatattggataggcgcgacgcagacaaaaactccaagtggtttgagtttggtcgttctcaagcgcttacacatattaatcaaaaaaaattgttagtttcgacggtaatcaccggaaaagtgcatgtatatccgctggatatcgaggatgttccctattctggaatatttattaccattagagactgtgctgataaattacctttgacagaagcaatgacaattttaaatagctcagagtttttgaaatatcttcagccgcgaggaataagtgccaagggaaaatcaatccgaattacgacgaaaaatatatccgattattgttggtaaaaattttgccgtggaggtatcttatatggagaaaatgaagtataaaatgtcttctcgagcaactatattgcttggcagagaaagtgtatcacgggttgatggtgccataattgaactggtaaagaacacatacgatgcagatgctgggttttgttttatctgttttgatgttgaacatgatcacatttatattttagataatggttctgggatgacaaaaggcatcatcgagtcttgttggatgcttattggaacagataacaagcgtgtggaatacttgtctgcaaagaatcgcattaaatcaggcgaaaaaggaatcggacgttttgcgcttgataggcttggcagtaaatgcagaatgtacactaagcatgacagtgaaagcttaatctgttgggaaactgattggagtagttttgaaaagtcgggacagattatcgatgatgtggaggcaaatttctcctactgcccggaacggcaattcgaagatattattcccattgaaattaaaaaggctattgcacaatatacagaagaagaccacagcaatcagttttccttgaagagcgggacccttttttcaatttccgaactacgcgacaagtggagtgatcgtgaaaaggaaaaagttatagatgtcttaggatatcttattcctcctgttgaacaacaaaactatgcaattattattcaaagaagtctgaattcagcggcatttaaagtggacaatgaagttactgatgactatgactacaaagttcgtgcacattttgacggaaagaaagtaacggccacggtttttagaaatgaatttgatttaaagattttgtaatttccagccctaaccttatgtaacccggcaaatggcggcaataccttgatttctaggcgtttccgctatttgccgtttgggagagtgtttcgcatatctcggcgtatcttggagtgactttgcactgaaacgtagtacggaagtagtaaacctggcctttcgcttcctttttactacgcggccagccgctccatctccgcccttacggaacaggcatcaacatgggtgtaatagtccagcgtcatggtgatgttggcatggcccatgatgtactgtaaagccttggggttcataccggcgtttgccatacgggtacagaacgtgtgccggaaggagtgtggggtgatattgggcaatggctccttgtgctgcttgttatacttcttcaaaaggttccttatcatattgttatagtccatgcccactttcggcgttccatcccttttgaggaacagaaagtttgtgtacccgtctatcataatggtggttttctttccacggttcttcaccactcgcttcaacgcttgatagactggctcactcatgggaatttcccggtagccgctcttggtcttaggtgtttcgatgtagtagccgctcttagggtcccgcaaaagctggtgatccacccggatcaggcgattcttaaagtcaaggttcgtggtcagcccacagaactcagaaatgcgaagcccggttcccagcaggatgataagctcatcaacgtacttccgatatactttgtcattttgcacaaagtcgatcagactcacctcctgttccggtgtcagcacggttttttcacctctgttgtcctctaagactttgtttagggcaaagctgaaggggttcttgcgaacacaatcgtcctcgatggcgataaagaaagcggcccggagggaacgcttgtagttgctgatagactggaaactaaaccccttttccttcatgcggatagcccactctttggcatcggatggcttcaccgcatcgatgcttttcctgccgagagggtcatcccgcaagagtcccatcaggtactcccgctgtttcttggtggcccgcttcacatccgcccgctgactgttctgcttggcgtagagctggcagacagtcatttttttgcccacagcgtcgatgccgtccgcaatatcccggttgatctccgtttccttctcacgcagagaaatatcatcccgtttgcctgtcggggtcttgtccgttgctaccagcttccaagcatagacgaactggggcttgccggtgctgtccgtgtacttatatgcgtatctcccgtcttttcgctgactctctccagttctcaaaatgcggcctttgttatcacgtcgtttttccgccattggtaaaactcctttccaaaactggaacgagccttgatacgacttgaatatagtgtatcatatttctggctcaatacaaatctgcgattagatcacatccagggagtcaatgactttttcaaactgcctgcgtttaatctggacgcggttgccattcattatcagccagttggcgtctgagttttcttccaccagttttcgcaacttcttttccccaatacggaaatacttggctgcctcctcaatggtcagcgtgtacttctcccaaataggcacatcggaatagctcatacgcccgcccctcctttcggtgtgaccacatactctatgccaggatactgaccgcagtagacgcaaaccttctcttcagcctgtccctgcgcggcctcccgcaaaacaaaagcgcctgtgccgcgaaaagcgtcagcacaagcgtcgcataagcagagagttagtttcggggggacgggttcgatcaggccgatactgattgccaaagcgtggttgatgccccggatatgttcctcgtccagtctgccgatgtagccagacaaccgccgcttgtccacagtacgaatttgctccaacaaaacgagggacggctgtaccagtccattcccggcgtccaggtagtagtgggtgggcaacttggctttgacgttggccttactggtgacggcggcgatgataaccgtgggactatgtttgttgcccacgttgttctgaatgataacaacgggccgggtgcccttctgttccgagccgattccgtggccaaggtcggcgtaatatagatcaccgcgtaaatatgtcttgctcatggtatttgacctccctataaaaattagacggcctgcgtcgcctatgtaggggccggacagcgtaacatattaaggttggcggggcataaacgctcccgttttcataagcctatcccgctgtccggcttatatcaaagcaagcctatttgtccgcgacaccccggcccgctgagggaagtcatcaaacggctggcggcgaccagctccacgggaatttcacccccggcaggttctctgtcggctgctctcattgcctgcgacggctttgcgttggaaaacgctatcacgctcggactgtgactgaacaggagtatcattgtccctattgccggtcttggccgtaccgggagccacccggcatttcataaccgctgattctcgctccatgctggacggcaaaccgtggacgaaatgatagtgtggcatcccgttgttctgtccggcatatcctggcgcaacgataagaatggcttgcggcaataggaatgtgtttgatgaatgggtatgaaattgtcaaggtcaaacccattcatcgcataaacgaggaacaggtgaagagctttccattgctcttcacctgtttcctcactcaaacgctaaattgtaacctccccggacagaaaatttttgagtttcttcaatgcagaagaaattgacttcatcacagcggggtgcttacacccctccatatctgcaatttgttcgtatgtaaactccccaaaatagtacagcaccagacggcgacgctgtttttcaggcagttgggcgattgctcggtgtagcttgtccatctccatctgctgagaaacgatttcttccacgctttcctgtggttttgcggcccgtctgctcagagtggcctctgtcatttcggatcgctcatagtgcctgtccacttcgttgaaaaaagaaagatcgtccagttcaaactcgttgaacgcatcgaatagggtcttgtcgatctccatccagcgttttaccttgttgctgtccgtaaatgccaaaaagtagcgtgggtgggtagtattgataccagtggtgtatatttcataagggttttcttcatccctccggcgcttgggacgagggtcaatgttttttggatgactgccatccattgttttttcctccattcgttctgaatttttgaaaattcagaacgtggaggactacgacaatggggtggcgagttgccgcagcagaaaaaaatagcatcaagggagtaatatcccctgacactgatttgaaaaaaaaccgcagaattgcccccaaacgagagctttcctgcggattgagactgttggaaagaggtaaaaaaaataggggaacgttgataaacgtaatttccccacagaataccacgcttgttacagaatacacgggaattttgtaaaattccgtataattcgacgcacgaaagccccgcaaagatcaggatgacctttgcggggcttatacttcgacaagatatatacttattcccggctattttaaacttctcatattcatccccgtctctttacaacgaaacgagcattagaggtgttatccggtatttttcaatatgacgtttgactgattgcctccacctctatctcccaattatgttactctacattcaaaattgcgactttggcaagagccgactaggacgtattagaaaagcaaacggacagccatttggagtgtctatcaatgcttcttgctcacaaaaactacttcacttcttgatccagtccttgaaacaactccgaactgaaaaattcttctattgagattccaaggccatcacataacttttttatcgttgtaactgtggcgctgtgattgcgcccactgacaatgttattcaccgtggactgcgtgacaccgctcaaaaggcacaacttattgatagataaattgcgctcacggcataaatctaagattcttgccctaactgcctctccaatgtccacgggtatcacctcaatcctatattgaagatacccgattgaacttgaaatgattacctcttttgagttaaaataactcaaaagaggtataccgcctattggggaacagctttgcagccacagcaccggcctaacattaccggcttcttgccatgacctccaatagcttatctaaaatttcttttgtagcccagaaatcagcgtcaggcaaatgggagaggcgatccgtaagaaattggagggcggcgctccgctccgcctcactattactgctctcaataccaaacaaaattgcatcagcaggcacggacagcaaaacacagagttgtttcagcgtagccagcgacacaccaacagcgccgcactcaatggccgaaaggtgctttacaccaaggccaatcagttccgcaaggcgttcttgcgtcagcccagcattttcccgtatttgttttacattttggccgatttcaagattgattggttttttctctttcatagtaacaccacctttttttgttagtctaactaatggtggcattgactataaccatctacttttattataatatataacaaatatgatagtgagtcttggaatgtgagcaggggaaacgccgatatgaaaatctggttcttcatcggccattataataattttgacaccatgacaaccgaagtgtagtcataaaagcaaaaacgccacctagcggtgacgttaattccccattctactatctgacaccacggggcctttcacagcacttgttggagacggcgcggaaacgctcggcccgtggcctaatatgcgtgacaccccatctgggggctataagttgaaatcaacgaccctaaaaacaatgtgtcggcattacactatcttagcacacttattggggaagatcatagtttgaaaatctgatctcaatcaaacttcaaaagttgatacggggcaacatctaaagcatttgcaatacggtaaatagcaaccattgacatgggataaggtgttgaagattcaatgtggctaattgtagaataacttaaacctgatttttccgcaagctcttcttggctcaatcctgattttttacggaagaactggatgcgaaaaccaatattctttaagaaatttgcctcattacctatatatcgtaaatttgggttcatattgttacacatccgttcaaaatagaggataattgtattttacttgtattatcctcgcttttgaacgttgtattctgggcttttaacgcagtattttcgcaatcaatcgaacttcaaaagttgatatggatgcacatcaagcgcaccggcaattcggaagatggttcgtagtgacatagtataacacgttgtcgattcaatatggctaatggtagagtaacttaaatcactcttttcagctaactgctcctgacttaaatttgcttttttcctaaaatattggatacgaaagcctatgttcttcaaaaattgggcttcgcccattaaatattcggaacgactacccaatcatcttcactccattcatgtgtagtgtggttatgatactaaattttccatcgcacatgaacgttgcattatagtattatattgtagtattttcgcaagtatgataatatatttatgcggtttctggcaaaacaccagatgcttgaaggattatttgggcaactacatggacgcatagctcacccttacgcggaaggagtatgagagatgtctgcttatgattttaccgatactctcgcagtacaaattctcacctacaaaaaagaacataacgaaaacgctgcgcagtttgctaaaggatgtggcgtcagcgccgccacaatccgtagaatagaaaacggggatgtcaatgtgaaactgagtaccgctgataagctcctccgctacatgaacataactctcattgatttattgccccccttggttacagaaagtcctattgcagagggaaaagagcgaccgagaaataaaaaggccactccagccccgcagggagaagtggccgaaaagaagattttattttccgagcttttagcgaatattccatcagatgaagtgctgacagagctgttacctgatccttaccgcccccaaagggcgctgaccacgcattccgggctggaggtcttaaaactgcgcctggaagggctggacacggctcaaaccgcggagcggctacacatgacactcagccaagccgatcatcggctacggaaaactgtgcgtcagcttactcggtacataccggaaaacatagtgattgatattcccgccctgcggaagatactgggaatacaaccgtttcatttcacggggcgctatacaaaactgtcggagctgttgcgggatatgccatccgatgaagtgctgtttcagcttgaccgcgagcgcgggaatttgaccggaggcagaaaaaggcatcgtgtcagcaatcaggacttgtatctcctgcaacagcggctggccggccacacctatcggagtattggagaggaacttggtatgtctcccaaagcagtccgtcaccggatattgcggatcaaagttggattaagatggtatttagctgttgatctggatgtacccgccctatttaactaagggaagaaattggacgccttttcgccttgtgaaaagcttatctaccatagtctttccataccttagaaacacctcaaaatgaacgccggaggcaacattatggttatagataggacaacagggaagggttgcgctttaagcatagcggctaagacggtcactcgaaatctaattgccgatggcattattggcaaaacaattgctaaaaaggagcgccctaaacgctctgtttggctccgggtgcgagactacggagatgattgggtatgtattggcgggaatatcgctcatgaactaacagaggagccgttatgggtcccatctttcattgacgaggggatatggacacaggcggtcagcaaattccatattgatagcaggttggacgaaaatgtagtggagtttttgttaccagaaatggatgaatacctgcaaaatattcctgattcagaactgatttctataacaagagatttcctaatagagaacggcatactcgatcagcccattcagcgacgcaaggggaacacatattattttgacaagaatgagatttattctcttgataatgagagcaaattatttccatatgaagggagaataagacatatttttgcagtcaaagggccagatgcagcatttttcaattcaggcgtttggattaaagctgcgccccggtttgaagttggaatgtcgctgaaagaatgtatcgggatttttgtagaaacagaactggcacataggaccccgcagaaactatccccccttgatcaacttatacagtacatagctcggcctgtatatgagcgcgttccaggcaacgacaatgtaaaaacatttgaccgtattcgcataactgttggtctcccccgataccagttcaattcgtgggaagctctgcaaaatgaagtaaagaaatctcaatacgaaatatatcaacgggtaatccaacggttggaaacagaccgtccgttcaagagatatggtgtaccaatcaattttcttgaaatcagtaatgttacattattgcgggacttttcactagagtttatttttgagctgaaggaaccaaaaattaactaaacagggaggaatttagtgtggagcagaaaaaatcaacactgaaaaagatcaaagctacagttatgccgcaaacagcagagggcctgcaaatgctgatggaggaaacagggttaaccatcggagaagtgatcgaccggctgacgctgcaaatgtgtcctgatgacttggggttcgcagtttgttttgcacaagatcaggtttttttcagtatttcaaacttgccggaggaagaacaggaagaagccctgacgaaaatcattatatttttggcagggcttgtgccagtagatcatctaaagggcttagagcaagcagccatttccaagcgtgcagagagattaaaggaatataaggagtacatcgaggatttgccggaaaaggatgcgaaagggatattaaaagaactagctatactcgaaaaaataagggcacagaaataacaattctgaatatcaagaaagtgagtgaaatcgcatgaaaagaaccaaagagatgaaaaaagagtggatagccgagttaaagaaaatgcaaaaatcctatcagggggaaatttccaccgacgatctgccttttgaccttactgctgaacttggggaggttgtgacagtagaactaaaaagtcccggcgtatattacattgcgaccaagaaagcgggagatattccagagtgtccagaggtatatgttgtgacggctgacgctccagctatatcagagaaagcctggacttatggacaggaatttcccggccatcccgatctgcgtgtttatgacattctccagcccaaaagcggaagatatatcatagattttgaaatgcgccggtatcagataaaatgccacctgccggaaatcgaggacgaggattctctatatactgccgcgctctatggagcggaagaacatccggattattttggcgctttccctgttccttcctttactccaagagggttcactgtacggcataagaccattctgaacggtgtgtattggctggaaacagatcgctgcgaggaaatgctggcggtttgttatccaatctggaagtcagatattagtattccagagcaaaaccagggtgagcaactggagtatgaccgtatgtatgggattgacaatacccttggttatctctttttctccaagcagaacagcgtcatcccactgcatgagctttcccttttttacccagaaataaaggaaggaagtgtagttgatatggatgcgctactaaacgcgatttgcgaattttacccggagtatgtcacaatccataatgaagaagaagcaaaatttgagcatggacgttttataaaggaaacgcccggtgttggcacagagtttatcaagttctgataaactttatgctgagggataaaagttaaagaggatactcctttttagcggctgaacacactaagtaatcgaactaaaaactatgctacctacgcagcgtagtttttagtttgatttgctatctgaacagatggcgtgatatactgattccagataatcattatgataagtgttcctaaaacctcagatggcttttggggcttccccatgtaggcagccaatccacaatagaagggatttttatgaatgaacagcaaggtgtcaggccaacagaacgaatgacatatagagatagcacctatagtatcgtctcaaaggttgcttatctaattggcgtcccaaaacgaatatttgagaaccagcatgagccaccgcaactcgaaatattccaacagttagagaatgacaagaacgcccggattattcgtcatctgtgcatcatacggacagcgattgaacgaaatttcaagtacatcaatgataaaatgagaacggaatataaaaccattctttcgctgccacaatttgtccctgctgattctatcggccaactatcagcggataacgtcagttttatcagaaagtggaacacaaaattacctgcacatattattgaaattaaccgaattatttcggaccgtatcaataactgcaagcatttatttcccctctggcttaactggaaatacatccgagagcttttcatcatgcccaatggtctatgcgaaaaagggactcaagaagcagcggcggtctattatgaacacatattgctttatccctatcaaatgtatattcattggagtcccagcgatcagggcaacatcttgttcaatgataaaagatttgtttccctgctctatcgttggcataatgacgagtttaccgagtacaacaaagtctcagacgccggcagttatataaaagacagcatctatgattttattgatgacagccgaaaagtggtaatcgtagtcgattgcgaaaattcagacccctataagttaagcgcgaccctgcggcggctgaacagcacatacactgaaaaaatcacttcgatcatcctctttgacgatattcacactgcttcagcttggagcagcttggaaaagtttacctctgtttcagtggagcatattttgattgagcgtatcaagcaaaacaagtcgttggtggacattcgtctgactgcgagggcttgccaggaatattacgaaaacaacgtggattcctttatcattgtttccagtgattctgattattggggccttatttcgtcattaccaaaggctcaattcttagtgatgattgaacacaataaatgtggaccggatatgaaagccgcactcgccaactcagggattttttactgctatttggatgacttctattccggcgattcagaagaactaaaaacgaacgctctgttgcaggaaatgcgtgattacatggagaaagccgtccagttaaatgccattgatatgttgaacgatgcgctccgctccacccgaatagaaatgacttcggctgaacgccagcagttttacgacaaatatattaagacccttcaactttcgatcaatgatgatggtaaagtttcactggtcatcaaggtaaagtaaagatttctttgcaatttcagggactcgtatgcaacagcggtttgattcttaatactacatagaaagtccagctaataaaaatcaagagaacggtagaaacaggctggtggcctatgcccgccgctggccggagcattgttaggaggtggacgacgacggctggggctgcaagacctttgaaatcgacaagggccgcttctgtttctggctgaccgcgccatacagcgaggaacgccaggaggcggcgaggaagttcgttggaaggagggactttggatggggatattggggctaaaacttaggacaaatactccctgtgcagatgtgattaaaatattaaaacaatttgatcctgacgcttctatatcaaatctccgtttcaaaattatacacaacgatttcgtttatgtttgtgactacattgatgaagatggaattatcaccctgttaaacttactgcatgaagttgaagctatcaaaattgatgtggacatatatgaacaatcagaaaatggagatagaaaagtaactccatttctattacaaaatttattggagcaatataaagaaattgcacatcaaatacaggaaatcgtagatttagaagcagaggactaaatccctttaggagctaagtccagctaataaaaatcatgagaacagcagcaacagactgggagcctacgcccgccgctggccggagcattgctgggaggtggacgatgacggctagacctttgagatcgacaaaggccgcttctgtttccggctgaccgcgccatacagcgtggaacgccgggaggcggcgaggaagtttgcgatggaacacagtggcgtcgagaggttgtagtaaataaggcaagagacataataggagtaattataatggaacaggacggtattgtgtctgtatgggctggcttttttgaggatgaagcatccttaatggcatatgccgccgaagaaggatacgacagtgaaggaaacaaaaagatttccccctttaatcaggattttttcggtggtaacacgctttggccttttgaccctgatttttgggaacgaaatttggttgaacccactatggatgtggaagctttggttgagcgattttctgaaggcacagccataggcccagaactgaaaaaaattttcccaaaggggttagatagggattataatgcggcgattttggtctacaactacaaatatgatccgaaagaaagcaagtccaatccagatgcaccagtgacctttttgggggcagtcccatgtgatttgggctaacaagcaacttctcatttgttgtggagttgcaccaggaccaaaattccttgggaagcaagggcgcacttctatacatagtctaacggccatgtgtagaagtgctctgcgaggcaaaacggcggattgcagatggaagcaacccgccgtttctgcgtcgctgcgctccgtccaaggggctgcaccccttgcgcggctggcttacgccgcttaccccgcccgcccccaaaatagggacacccgccctgcgtctgtcccccttccgagggcctgacaaccgaacaccgacactctgaccgctcaccgggaacgccccggaggacggccatttttttacccatttttcagccaaaggtgggcaacaccttttacatggcccgccgcagacaggaggagacccacacccaacgctgggacagggacatggattggcgagggacttcccatttccttccttggatggtaaaatgaaattgatttgatgggccgcccccgctggaacattttgctccaaaagagaacggcagaaaaacaaaaattatgtagcaaacggagtagagaggatggatcaatcaatgatttgtctacccagcgacgtaaaaactgctttagaaaaaacaaattttattaaaagatatgagatgctttctaatacttttaacggagaaagaacgcccttaaatgaaaggctgcgttatattgatggtgaaattgttttggacagtcttgcacagttgggatataaagcacattttgaaagcaaggagaaatatttctggattgaggaagttcagataggaacctatacgttctccggcaacatgatcttagacggcggcctggtagatatagtctggatcgtaaaagaaaacggaaatctaatcttagggctgccaataggagaatattccagattgatgattgctccaaactacaaaataaagaagccgatttttggaacttatgaagatttagatgaaatagttgaatcagtcttcaaactatttgaggattttaagaaagcaatgactgcttcgtgaggaaaccagcgcagactgtcccaacctctgtacactttttccggccagcgggcagtgggagggataaaacgcaaaggagatctatatggggatttttgataagctaaaaggtggaaaaaaggataaggtgtttgaagatgaattgatggatacgcagtctgaactgattgcgcttacattaaacatggtcggtaaagcagcagataaaatatttgcctattgttccatagaagccaagagccagatgttcaatgtgttctttgaattagacggaaaaatcaaaacattaaatgaaatggggatagtcccttctcgtgctatggaacttttaagaacaggaacacacggactggacaagattaaagaagtatgtgcgaaatacaactatcccacccccacagagattaaaatgatttatgatgtgaaaacaaaaaaatttaatgttggttatcaatataaagagatttgttcagcaaaaactaatattagtgcaggagaagtttttatgaattgggttacagccaaaaagaatgagagcacataaaaaacaaaggtgcggccagcaggccgcgcctttcctataacccaaaactgaaccccaccgatttcccattgcggaactggcggcggcgctgggacgcagcgcacagacttgcaagcgaaccttgcgggaattggaggacgccggactgatcctgcgggtgcgccgggagatcggagcgccgaacaggatttatgtcctcattccaagaagattaaaccgttgaaaaacagaagaataagccgcccaaaacagttttacaaaaggtttcaggtttgctataataaacgcaggaaattgaggattttgactaatatttcaatgtgcgggagggtttcataatgtggatagttattttagtggcagttattgcggtgctactcattctttacattaagttctataaccatttgcagcggctttccgtcaaggtgcaggaaggcagcgcgggcattgatgttgctttggagaaacgctacgatatgctgtcggaagaaattgaggcagtaaaaaagtatctggcgcatgagtaccagatctacacagaagtcacatctacccgcgcggggaaagaactgaacgaaagcatatttcaggaaaagaaacaactgtctgaggaagcggtcaaagcaatcagcgagacgattgccgaacagcaaaagcagatggaaacaatccggcagcagttggatcagcagcgagggcaggataactcttttggagcggaaacaccgggtatgggggacgacgggctgatcggacatcaggtaagtctggatcggaaacttggcttgcttacttccgcccagcagggactcaccggggtcaactctgccatcaatgcactggctgagcaatacccaaccctttattcctatgcgtccatgcagcatttccagcaggatatttttgacgcagaggaacacttacaagcggcaagacggctgtataactccaatgtatccctgtataatcagagaatccacacctttccttacctacttttggcaaaacttcatggcatgaaagaggcaaagttctacactgtggaagaaaagaaaaaagactttaaggtgcagttttaagaagaaaggaaaaaagatgtatgaaaatggtggaacagaatatcagcggtgtcaagctggagcggctgcggcagaacgctgtaaaaaaacataagattcttcggaagctgctcccggtgtgcctgattttgtttataggattgacactggtgaaaaaccgatttttgtttgtctccatcagtgaatatggctttggagacccagcaacccaggggggcctttggggtctgattggaggcctgatgctcagcgtgatttttgcgggtgccatttttggtttttactatatgctggtctataaaaaagcttatgacctcttttgtatcaatttcaaaaacaaatatgtgttggacactctccgacaactgccggatttttctgaattgcgctacaatgccggaggcggcctttcttatgaggaaatgaaccgtttaaagttaatccccggaggccagtcggtcttttatcaatcgtcagatgaactgtccggcaagctggatggagttcccttccgggctgtcaatgtctgcactggcgaaaaagcttccacaagaagttctaccccaaaaattctatttgagggacaggtcattgttttttcctattttgataatcggaagatcagtgaaggttttgtccaggtgttttctaaaaaagccctgtctaaactcagggaaaccagagtcccgctgtcaattcagacagaaaacagtgtattcaacgaaaattttgcggtgtttgcagagaacgagcagaatgctttttacatcctgacaccccaggtgatggagcagattacagcttttcaggaagctatggaaggaaatgtttatctttccttttctgaaaaatccctgtatgtaacttgcagccagcttcgcaatccttttcatatttacatcgacatccctgttgaagaacagcgtcaaaagattgctgacgatacggcgattctccgcagtgcaaaggaaattctcataagagccggacaaagcagtccgaaataagaaggcagtccttgaaaggcggtaggtatcatatgggatgtacaattgtgttcgttatcctgcttgttattggaatgggcatcctctgttttctgacgggggatatggcggcttttatcgccctgtccgctactttagtcgtagggcttggtcttgccggtattctgtatcatatctataaatcgaagcaaagacggatggagaagtataatcccctatcccctacattgcgctggatgaatgccgcagggtcgatcctgattgcagcaagtcaacatacaaattttcatctactggctggctggcggtacaataacgaatttgaccgggaaagtattaaaacaatgctgtgggattattggggcattcaaggacatgagacagctataaaggaaatgcgcagcctgatcgacgagggaatgcgtgccagctatcggaggaaaatggaactcttgtcgcataaatataaggatgctacagaagtccagctcattgaggaggcccgcaaaaccaatccaaacgcagatgaggacagctatctgccgaaaatgctgatggcctggcggcgctatggggaaaatgccctgttaggctgggacatgggacgttgcgcatatatcacgcaatgttgctatctggcaggttatatcagtatgcaggaaatgctggatctgtgcgtggatgccgggatgaaggcacagtccttttttcagaattgggaagaaatgatggagagctatctgctgggcggccagttctggcagcatgaggataagaatgacccaaaatccatgacggcagaacgatggaagctatatgaacagctctggcaaggaaaaaagccgttccagggttctccgtacctcgctgtcccattcgaccagcttctttccaaagaggtcatcaccaacgaatacggcattctgccggaataccaaaaatattataatcatggatagttagctttcggtacagagtaagcattgatagacgtgtctacaaatactttggaaatgttaaatttgactattaagtaattggaaaatcttttcaggaacgaaatgcacacgtatatggtctaacagccatgtatgtgtgctctgggaggcggaacggcggattgccagatggagcaacccgccgtttttgcgtcactgcgccccgtccaagggactgcgccctttgcgcggcttacgctgcttcccgcgcccgcccccaaaaggtaaacacccgccctgcgtctgtctcccttccgaggaccttataaccgaacactgactgcgcaccgggaacgccccggaggacggtcatttttttacccatttttcagccaaaggagggcaacatcttttacatggcccgccgcagacaggagcagacccacacccagcgccgggacatgaatcggcgagggacttcctatttcctgccgctggtggtaaaatgaaatcagttttacgggccgctccccgctgggacaaagtacccatccagtggaaaaattgttgatttagaaccggatgtaataagagggaaatgaaaatggcagagcataacgatgatatgacctataaaagcaggtttcatttcatgtgttcctgctatcgattgccggaggatggaagttttacagttggtcaagagtatgcttttgtgaacactattgacgtagttgagatcgtggatgatttaggacaagttatggtatttcctgaaaaaatctttgagtcttacttctgcgactttgcagatcctgtgtatcctgtaacttctttggggcctatagataagacgatctatcatctctattttgttttggatcaagggcaccacagtttagacgcaatcaaagcgtattccaaattgttcaatgtgaactatgtgcaagcaaagggcgtattaaacgataagcgggttttgattgctacaggaagtgctcatgatatgagagaaatactgaacgaactgaagcattttcaagtgcattatgagatcagtccaccctacggctctgcggggcgctgaactgtgatattgcagatgtgatcgctttggagcaggatgaaaattccataaatgaaatagagtgataaattaacataatgggaggtgcgctattactatgaataaagattttccactaaaccgctttaattttacaaatctcatcaaacatattagaacagaaatattgataccaaatgtgattaccgatgatgaaacaggaatagaattttatggtggggatagcattccccaaaaggcactgattgacttactcaaaaatttcaacataattgacaatctggttcaacaaagcaatagcgaagaatttaaaaagcaaacacaacttgatattaagaattttcagtttgaaccgtcatgggtaaaaattactcctgacaatattacggttggatatgtaggaatttatgtaaatgctgatttcagtttaaccttttcaaacatcaatgataaatgggttttggagaaataacaacttcccatttatcatcatcgggccagccagcggacggaatatgagaaaatgacagcgcaaggcgaaacattaaataacctaaagggggaatttcaatgctaatttctaaatcagagtattctgttacggaggctgctctctccaaatacgaaacggcacatggatttacctttccgcaggagtatcgggccttcctgctgaaatacaatggcggcgaaaccccggaaaccgacttccgcctgtccggtgtgtcatccgatctggtttctttctatgagctacgggacgatggggacggactggaactccatgagattgaacttcttgtgcccgcatttctgaaagatcatatgctccctatcgcttccaatgtgtttggcgataacattttcatctgtgtggagggacgggaaaacggaaaaatttttttccgttaccatgacaggccaaagcgatatatcaaacttgcggatgactcccgtacttttattcagaaatgcaaaagcaaaaagctggggcgctgctatacgattgaagatcggattgcgatgagaagaagcgcagggaactttgagcccccatctgcgattgcactttctgaatggcaaaaagagattgattactttaaccgtatccaccaagagcaagtagagttttgactgctgttttgcccagccagcgggcgcatagtaaccaaacaccacctaccaaggcacggcagacaggccgcgcccccgctggggcaaagtgtcctaaagccgggggcatgaccgccccgcccaacctctgggcactttgtccagccagcggacggtggaaaaagttgagggaataaaatgggaaactatgttataaatgaaatctattcggatgggtacgaaagatttgcaataatagaagatattgggaaacatataaaaataaatgtgcattttcttgagtatgatgaatatttggaaagtagtgaaaattctcaaaaaagaacaaatggagatatattggatggggacttatcaattcaactgataacctttagtcgaaaagtagatgtaaaggaaactcttatccattttcaaaaaatacaaaactctccacatatcgaagcagttatagaagcgactcaaataattgatgaatattccatgtatgcgctttcaactgtatcagatagtaacattttggttgagtttgaaaatacagtcagctataaagtaggagacagagttttggttattggatctttagaattgaacgaaacatcttaacaaaaatagtgtgccaagcgaaatatttgcgttgccccacctctggacactttgtccagccagaaacggaaaatcaaacaccatccaccaaggcgcggcagacaggccgcgcctttcccatgaccaaaactgaaccccaccgatttcccctcgcagagctggccgtggcgctggggcacagtacacagacctgcaagcggtcctttcgggaattggaggacgacggactgatcctgcgggtgcgctgggagatcggagcgccgaacaggatttatgtgctggtgccgaagaagcgggattgaagaaaatcctgcggaacggtataatggaacgtaagaaatcagcgccgccatacagcgaagaacgtcgggaagcggcgaggaagtttgcgagggaacgcaatagcgttgagagattgaaaagttaggctgaaggctgaaggaggaatacaatgtcaacggcaaaagaatatttagaaacactgtaccagcaagaacctcaactgttttcagaaccattgaaaatgtcaatattggtagaacccgatttgcaatttatagaacagcagataggtcatcggcttccaaaacaatttgtagagttcttaacaacttatcaacttccacaaatgacaatgtttattactttttgtggtgatttagcatctgccttatacaaaactttttcaagagagaaaaacggatatgttttgagtaaatcagaagagtttgtagtggtcgacttcacatggaacggcatgaatgggaattgcggagttgactatcttaaaaactttgaacggtatgaattgtcagaagcatggttaaaggccggttttatagacatcggaagtttctatatggaatcctaccttgtcttttatgaccttgtgacggaaaaagtttgctttatccataatgaagatataatggaggcttctgtcgattgggataacataacgaatatcagaacttttatgttagaaaattctcgtttattgggcaacagttttaatgactttttgcgtactgtttgcactggggaaccgtatgatgacgaaatcatatttttgggagaaaaatccctttaggaactaagtccagctcataaaaatcaagagaaaagcagaaacaggttggcggcctatgcccgccgctggccggagtgttgccgaaaggtggacgatgacggctggggttgcaagacctttgagatcgacaagggccgcttctgtttccggctgaccacgccatacagcgaggaacactggaaggcggcaaggaagtttgcgagggaacacaatagcgccgggaggttaaagaattgatgatatatcgtgggggataataaaatggaatatggctatgatacattttcaaccgtactgccaggtgatatttttgaattgttacttgaattaggcaacgaaatgggaattgatcctttttcaagtattgaaagcgaaaactattttcgtgaattgttgaaaacttattctggtaataaaaatgaggtaaaaagatactttgaggacacaatcaaaagagatttccaagtgatgaaggaaaaacctcgatggatacagggggacgagtggcaatttcataggggcaagccaatgattttcgtagggcagcttgatacttccataaaacgcgatggagtatcatacggaatttcgttttttgtcttttgggactataaggatggtgtcacgaaaacagtcacgcaaagtgattaaaaagctatgcgctcacaaaatccttttaggaactaaaggcgcacttctatacatagcctgacggccatgtattcgtgcgctctgcgaggcggaacggcggattgcagattaaagcaacccgccgtttttgcgtcgctgcgctccgtccaaggggctggtctcgcctgccagctcggtcggcgcttcaaggcgtttcacgccttgaggtcgccaccggcgacccgcgcccccttgcgcgtcttacgccgcttaccccgcgtacccgctgaaccgatacacccgtttgcgcggctatatcggttcggcgggtctgaaaaccaaaaccgacaccctgaccgctcaccgggaacatcccggaggacggtcattttttcacccattttcagtaagggaaggcaacaccttttacatggcccgccgcagacaggagcagacccacacccagcgccgggacagggatatggagtggtgagggacttcccatttcctgccgccagtggtaaaatgaaatcagctttacgggccacgcccccgctgggacaaagtgtcccaaagccgggggcacgaccgccccgcccaacttctggacactttgtccagccagcaggcggcggaaggagacgaagtattgagcaggagagaaatataccgaaggacaaaaggctattccatttacggagtagtaaatgtcaaaatattttccgccgcagggattttgatggttgtcgcccttggtctgaaaaatcctcaacttatattggacagtgatatattatgtgtgtctgcattgtgtggcgctgttgcactgttttggattttacgctattggaaacactggcttgacattttcaaaaaagaccttattctttttgaaggcgaagttttttcagaaggcgcggtgccgggatcaaatgcggaaagctcttgggaaaattggcggcttacagaaaagggaacggacgcgccgcggcattttgttatttgtttacggcagatgaaaaagcaatatcaaaacaatgctttgatcccggatatgtgccgtgggccggtttcgtttttctatctaaagcggacgaaatgtattgtagatattgtgagtatttccacgcctgaacaagatcaccgaagtagacacgcgcagaaaaaagcaaggcgaaaagcccaacatcagtaagctcctcgcctctggacactttgcccagccagcggaaggtgaacaggaggaagaacttatatgggattttttgataagttaaaaggtaggcaggtaagagatcagattaaaaatgaagcatattttagaaagtatattcaacagcaggaaaagcggatcgaccgtttttccgatatgataaagcaagaacaagtaccgaaagaaagaatttgcctggttgaagcgtttatagccgaactgaaatcttcggtactcacagcaaaatatagtatgggtgccgaactgaatgatttgagtaaggaatggcctgaagttctttgcacgatggcaaaaaattgggacactaccatcggtcaggcagatcttataaatacagtagctcttgcggtgctgtatgaggtggatggcacaacatgggacattgtttcaaaagctgcctgtcaatacgggcgaaaagattggctggttggatttctgctttcatcgagagagggagggccggactatcagacatggaaagttgctatgaaaaatccccaccaaaccttacgcaatatcattgaaaacagcccccaaaaagccaaggacatcaaaacatatttagaaaagaaatggtataaaggtcattatggtgttgcatggtatgatactcataagtccgaccaaatgacttattatggatattggagcaacgaaactgcggcggcggttaaaatattgggaatagacgatagctgcctgaaaaaccagcaatattatccgtatgatctggctcacttcaaaaaataattttgtgtctaaatcaaaaatagcaacatcacaccaaggcgcggcagacaggccgcgcctttcccatacccaaaactgaaccccgccaatttcccgttgtggagctggccgtggcgccggggcgcagtacgcagacctgcaagcgggccttgcgggagctggaggacgccggactgatcctgcgggtgcgtcagggaattggagcgccgaacaggatttatgtgctggtgccgaagaagcgggattgaagaaaatcctgcgggacggtataatggaacgtaagaaatcagcgccgccatacagcgaagaacaccgggaggctgcgagggaacacaatctcatagaaaggatgaagaaataatggagagttgttcttgcggtaaatatcaatatggagatgaagcaaaacttccagaccctgcttggcaatatgtgaaagagggatttatgggtacagtttacaaatgttgcaaatgtgggtgtttatggtttaagactataagtagcggtataattggaatgcccatatatattaaatcaaaacctgatgcagactttggaaagccaagtccagcttcagatgtcagacttgaagatttacttgtaaaaaagtaacgggatatataagagtggcaaatataagattcctttaggaactaagcccagttaataaatcaagagaacagaagaagcaggctggtggcctatgcccgccgctggccggagcattgccgaacgagggaacacaatattgccgagaggttaatttatatataaaggtgggaggtatattgctgtgacttcatatcacatggtttttaagaatggttatttcgggagtattaacaaatgcggtggacttccaacacatcttccagagatatggccgcaaatagacggagcagacttagcctttctatttcaactttattgtgatggagaaaagttgaacataccaaacactctttgtatacaagggtatcagttgtttgaaaaaggagattacaattcggacattgtagtgatccaacttccgctcgatgcaaaagaaaatatccagcaggtaggtctttcgtgcccggtttccccggactatgcaggcggagatattgaatttgaagtggtagaagaacaagacaactacgacttggacgatttaaatgttgatgacttttatcgatggacaaaaatgggagtaccatgtagcaaactgctgggctggtgtgaaaaagaaatcatcccatcgaattgtgcgtttttagggtggttagcagatgaagatccttttgtcattggcaacggatataacctgtgctttttcttaacaccagagggaaaggtcattgccagctatcgtgcgccctgttaatatccagtccagctcataaaaatcaagagaacggcagaaacagactgggagcctacgcccgccgctggctggagtattgccgggaggtggacgatgacggctggggttgcaagacctttgagatcgacaagggccgcttctgtttccgtctgaccacgccatacagcgaggaacactggaaggcagcaaggaagtttgcgatggagcacaatgtcgttgggggatggaaaggattaaaatatatgtccaaatcaaaattgcagttatatcaatttatgagaaagcaccggtcaaaggtgttcaagttgatgaaggaataaatattcttgacaagctgattaatagcaataattatccgattgaacgatcaacgattacgaccataaatggaacagagacataaggtgagcgacaaagcagaatttatgggaggtgcgtatgctttttaataatcttgtggatgcaaaaaatattatgggttcagtcacgaaactattgcctatagataatccatactatgaagattttcaattttttagttccatcaactgtactacttcatcagagtaccgagaagaattaaaatcctttttggaaaaatttataattaatcatgcgatactttccatgcctgataatgtcatgaatatatatccgttgctggtaaaattatatggctggctgtaaaataagacaattccagttcatcgaggagctgcaccagcacaaaaatccctttaggaactaaagggcgcatttctatacatagcctgacggccatgtattgtgaaatctgggctgatttcacagcggcttaaaaagggaactaaacggatgccctggactaactgtttccggtcagtccagggcgaaaaaatacatcaataggcgggcgtaccgtatccatagatctcagcgtgtccaatggcgtactgacgctcccggcaggcattgcctgagttgccctccacggtgtagacgatcccgccatccaccttttccacgatgcccacatggtctgccgctccgtcctggccttcgtcctcatcgtcccagtcgaaaaaaatcaggtcgccggggcgcggctcatagctgccgtcctgccacagccctctctcccggaaccactggatgccgatggagcagcttgcgaacttggggattacgccagcgtccagatagccgcactcattggcgcaccaggaaacaaagcaggcgcaccagtccacccgactctcaaagccataccaggaccaatagggctgaccgcctacattgccgagctgggagagggccaccgttacgatctccccatcacctgtgccaatgccgtatagaacagcactccacataccgttgctttcttcagccagtaactccgcaagcatctctcgctggtcagcggtaaaattgtagatgtccgccatttcatccgtggttttgtgggtcacggtaatataaagggtcgtggccgttacctcgacttcttccacaatgatattgccctttccatcatcagtttccacggtttgggtggtggttgccgtttctgtccggtggcttatctcgttcatggcccaaaatatctctttcaggagttcttttttcccatcatccatcgtagcgacttcctggggattgtccgggtcggtggtagttttcacagcatagacagccaacacttcgggccagacagcacgggagccggacagttccaggcggtcatgtgcggcgctgctctcaatttctcccagcttgctctcgtattccaagttgatctcccggacaacggtgggcatggtctggcccgtgccgctgtcctcaccagaaaagaagatgccaaagggagaggcggcgatcaggccaatcaagcagatcaccacaatggcaaggatggcaacccatcctccagcggcgatagcagtcaccagcgccttaatggacgcaagcagcgcctttgccgcagcggaaacgccctttgcggcggcttttgcggtggtggcggtggcctttgctgtgacgcgggcggcctgggcggtcgctctcgcggctctggctgtggcctgcgctgtctttgctgtatggtccgctgtcttgatgacggttttcgccgtgcgtggagcagtcttgacggtatgctgggcagttttaatcgttcgctgggcgcgcttgatggtgtttttcgtgcccatgccagtgtccttcgtagcctgccccatagcctgggcgggctgctttgccgtttttacgggaagttccttctgccgggacgcttggacggcgttttgggtcttgatttgcggcgtccggtcagatgggacggcctgttttttgacctgctgcttccgctcggcctgcttcttggcaaaggcccgacccctctccacataagggcttgtggtatccgttggacgctctatgctggcctgggcggatggatgctccgccatgtgcttatgatgcggaaggcgctggcgttctggggccgtccctccgtttcgctgcggagtgtgagcatccggggctataccctgggccggtccaggggcgtgggactgttcagcgggggccgtattctcttggcgcttttctgccgcccacttctcccgctggcgctgaaacagcttccggccctgtcgcaccgccgttttcgcgccggacgcggccacatttaccgcatcgtgggcaaggtcatcggcggcaagctctgtcttatccgcggcatactcattgggcgtggcctgccggtcatccatcagggcctccgcgttccgcttggaacggaggaaggaacttttcatgcgctggccgatcatggcggatttatccagcactttaatatctttactcttttcacgggtcttgatcttactcatggcttcacacccgctcgtcttttcatccagcggtgtttccactcagcaggggccacatagtagtccctgtggcgctggcccgtccacacctggcctccggctatgccgtcaaaagtaaacccagcggccagcaaagatgccccggtttccgatgccagcgtataggtgatgatacggtcatagcccatatcaaacccgatacggcagcaggctccgtagagcttggaacaggcgttgtcagtcccatccgtgcagcagcgcaggatctcaagggtcagcccatcgtccagataccgggcaacgggacggccacagatggcaacgccgcacagacggtccccatcatagcaggccacggcaaatttaccgcccacgggtgggatgctgtgccggtgataccggcccacatagtcccttgcggcccgcaggtggcatggcttgatgttcaatggcattttcatccctccaatcaaaagggggacgggcatcaggcccgtcccccggaaaagcggccctcaccgggccgggtggtcatcaagcggtatagctccgtgttgtgcggaaaacgattgacgaaaggcaccagggcagaaccgtatttaatcaggccgcacccggcatccgcattggtgatatagctcatctgctcctcggagatattcagcagatgggccagcttctcccggtcgcccgccgcctgattgagcatgacgatgaactcggagttactaagcatggtgctggcctgcacggagtccagaagatactccacattctgggtgatggcggtggggtaggcgttgcgcttgcggaactgccgccacgcggagttgaaaaaggcggcggaaaactcgttctcaaacatcacatggaactcgtcgataaaaacatgggtgcgcctgcccttcttccagttcagggtgacgcggttgagcatggtgtcggtgatgaccaggtggccgatgggcttcaactgttcgcccaggccgtggatgtcgaacaccaccacccgcttgtccaggtccacggtactgtcgtggccgaagatgtccagggagccggtggtgaacagctccagcgccagggcgatctcccgcgcttccgcctccggctgttccatcagcttttcacggagagcggcgagggtaggaactgtaccgttctgctctgcttcttcatacaagtcccccgtacagcggtcaatgatggacttctgcttggcccccacgcccttggggtcgatgcgctccaccagggacatgatgaactgcgacttcaccacaatggggttgttttcgccgtagccgtccaccatatacatggcgttgagccggtctttccccccagcggccacccggatcacgctccccacaccgtccatggcttcaatgaggggggcgtattctccctccgggtctgctatgagaatgtcatcatccgtattgagaatgaggaacacaatttcctctttgacgctgaaggacttgccggagccgggaacgcccagccggaaggaggactgattgagcagattagccttgttgcacatgataaggttgtgggagatggcattctccccgaagtagatgccgccccggtccatgatctcctgcaccttgaagggtatgaacacggccagcgattccgtggtcagggtgcggaaggcgttgatcttccgtgtcccgatgggcagggcggtgttcaggccgtcgatctgctggtatttcagcaccgccagttggcaccgcccggacagggagcgtatcttctccgtgtcggtgtcaagctgctgcttggtgtcggcggtgatgacaagggtgagaacagcctgcatcatccgctggtcgcgggtggtcaggtcggccaaaaactccttgctctccctgcgctgtaattccatatcgtaggggacgatggcggagaagttgttgttctgattttgccggcgctgccaattcgtgatattcgtctctacccccagcagacggttctccacctcccgcacagcctcgtccgtgggcacattgaggatgtcgatggacaacatcatattgcggtccaggtcggtcaggttcgtcacgatctcgtcctggatatagttggcgtagtccttcaggaacagcacccggcaatagcggtcgcccagcttcagatagtcactgtgcttctcaatcccgtccgggcagatgtagtccttgaagtcgtgacccttccgggccatatccgccatatcaaaatgaaaattgccctcgtctccggcccggtagaaatcgtggagaatacggagccggtccgtggcgtccagctccacgcacttggagccgagggcggcgaagcgggcggccaaatcggctccgacgcgggtgaagtaggcgcgggcgtcctcaatatcccgcttgtagactgtgatggtgacatacttctcctgggtgatgccattggccccggtcgccttgtccatgagcatttgattgtactccctgcggtacttgtccagtccgtcctcccgcatgggcatgaggacagactgctcaaagtccgcttggctttgacgacggttgcagatggtgagcttggtggtagcggcgcaatccaggctgttcagcagttctgagtagacccgaaacatggtttctttatcctcctgaccggccaccttgtaattgatgtcggtgaagcggtaggtcttggagaacttgatgcctaccttaaaaatgccgtccggccagacgcattgaatggggatcacatcctgcaccctgcgggggatacggtacggctcccggtcctgccgcatgatggtcttgatacttctaatcatggcgcttgtattcctccttttcccacttgtctatgctgggcttcaagagatcgtaatagagggtggacgcttcaaagcgcagttctctgggttccagcacctccgagcgcagccacgcccagatgaattgctccgccgccatgccgtggtaggtgaaaaagcccagggcggcgaagggggccgcgcccagaacgcacacccaggacacagtttccgtaccggcatagggcttcatcagaaagtacagccccacggccactgccaccgccagggcagaaaaaatgagctgccgcagagacagcccgaaaaacatactctccgtgtagttacggatctcgcggttgattttgacttccaatgtgttccctcctgtcatcgctcctggcgttcatgctgtttccggctgcgccgccgttcagcggccagggccttttgacgctccacctcttttgcggcggcgtccaaccgctccgctgtgacatagtagttcaggacatagcagccgaagtcaggataaaaccaggtgagccgtttctgatcgggtactctccgggcgtcctcccatttaccgacaagctctgtctgtttctcaatgcgctgccgcaaggcgggggcatcgtgtacttggtcattcatcggtggtgtttcctcctttatcgctccatgccccttttctgcctgggcggtttctggtgggagggataggggataatctcctcctccccctcaatgatgctgaactccgcgcgcagaaaggagtgggtttcgcggctctgccacaggcggatcatctctaacgcttccgcccgtgtttccatgcggcctttctgcaccccgtctttgaatagataaaaccgtttcatccaatgtgcctcctataagcccatcatttcccgtaccacatggtcggacatcttgacgctgcccaccaaaataagcatattaaaggtaatttcgccaatatagctccacaccatcgaggccgccgcagcgtccgggtcagcaacaggcggggaactggcgaacacggagaagatgatacaggccagcacgatgacggctccctccagacagacggcggcgtagcttttgagaaagctcttgcccacattctggctgggttccccggcaaaagtagacagggggatgggggccagcgccgcatacatatacatcttaaaaaagcgcccgtagacgctcaggatcattacaaaagacaggacccaaataagaagcccgccgatcagcgtcaccgcccatagggggatgctctcaaaaaagccgcaatcctcaacggctgtcacgatctccgcgggtaaaacagtggacgatggcgcgccgaagcccgccgcgttcataatggaggacaccacaccctggatgatgtccagaagggccagcatcagctccatgccataggtgatcagggcctttgccagaacaaagcggacaaacagcttcagcgcgtgttccggctttttgacctccacaaagctgccgcaggtcttgaccacgcccaccacaaagaacaacaccagcagggcgtagccgatggcctggagcgcaccgtgaatgtccgctatcacggcccagatcgcgccgcccttgaagtcctggggggattgggtgataagctgccagatctcgctcaacttgccattccagacctccagcgcattttccaggttttgcacgacccaattatccgacacgcaaagcacctcctttgggggcaggcttttggggcctgccccctgtgttcggataacttggcatcatcagccggtgataagggtcagaatttctttggaaaaggttataacaatgccgccagccagggtgaggaagccgttggaccgctgggaggggtcatggctctggagggagaggcccacctgaacgatgccccagcccagcaggatcaggcccaccgcccggatcaaaccaaaaatgaactccgacaaattgttgaccacctccagggggtcatcggcggcaaaggccgtcatggagcagcagcccagcagggccgcggccattaccagcgtgcagtagcagcgaaagcccttttttaccttaccgggcatggggagccgcttattttcctttttgttgttcagcattttcttgttcctccagttcaatgaatttttgttccaactcctcctccgtgagaagaatgaaacgatgtttcggcgcgtcctgaccatccttttccgctgcctgcttcaacagctccttgtcaaagcggatagacacgatgctgtggacatcctcaccgtgccggtatggttccgccccgccgtctgtggtgagtttgatattgggatgtttaaggatgtcatacttgaggtcccgcacgggccgctctccgcgaataaaaagaagcgcgtactggttatccagcatacgcacttcatccggcatgagcagttcccggcccgtgagctgccagttggtggagtagctgccgcttcttcctttggactggccgtaggtgttcgtatcaatggtttccttgcccagcagcttggacacatactcatgggtggattgctcgttgccgcccatatacagaaattcatcgcaatttcccacaaggctctcccactgcttttcaaaaagggccttgagctgggcgaggttctggataatgatgctcacggagatttcacggctccgcatggtggcaagcagtttgtcaaactcatcaggcagtgcgacattggcgaactcgtccatgacgaaatgcacatggacgggcagcctgccgccgtgtaccacatccgcctgatagtagagctgttggaacagttgggtgtagagtaggccgacaatgaagttaaaactggagtcattgtcggggatcacggcaaagatggccgtctttttttcacctaaactccacaattccatctcgtccgtctgcgtcatgccggccagcgattccagattgaacttctccagccgggacaccagcgtgatctggatggacttcagggtcttgccgctgccggagcggtaattgtggtaatatttcagggcgatatgctccgggtcccgcatttccaggcggtcaaagagttcatccaacggggattggtaggtgtcatcatcctcccggacctcgccagcccggatcatttccatgaccatggagaagttccgttcttcgggcggagcttcgtagtggagatagaacaccagcgccagcaagagcatctgcgctgcctgatcccagaaggggtcctgtgactgtgcgcctttgggcgtggtgttcttgaacaggttggtcacaagccgctggatgtcgttgtcgttgcggagataggcaaaagggttgtagcagtggcttttctccatattgattaggtcaagcaccttgatgtcgtagccgtttgcttcaagcagtcccccggtgtcgcgcaagatttcacctttgcagtccagtatgatcaggctggtgttggcgttcataatgttgggcttggcgtagaacctggtcttgcccgcgccgctgccgcccaccaccaggacattcagattgcgccggtgtctgcggccatccagtccaatggcgacattctgtgtgaggattttgttcgcggtcagctccttatccgcatatttcctgttgattccttttggatcgccccacttggcgctgccgtgttcctcccgcctgcggtagttgcggtcggtggagaggtagacgccaatccccagcccatagcagagcagaaaaatgaggacagttttcaagctgtcctcacaccatacaatgtgaaacggatggtccagcgcggccccgccgtaccgcaccagccccaccagtccgccgcccatatagggggccagcagcagggccagccagaccacaggaatgacgccgcaggcgtagagggtcaggtaggctttggagaacttatcttgcctcacggtcagccctccgtttctcccgtttcgtgggcgcgtctatgattttgagaatgagatcgtccacatcttcggtgggtttgccgtcccggagcgcatcgttgcggaagtcagtcaggccccgcaccataagccgctgttcgtagtcattcagcgtgaccacacgcttctcatcacgcatagagcgccctccttatctcgcctcgtcatctcggttcttctgcgccttttcctgggcggcaaagagtcggttcatatcggcggagatactcccggccacatcccgcatgacacccgcctcagcccggagcgccctggcgtccatcccggcatagctctccggcaggcgttcaaaggaaaagccctctaccgatacgccatttcttttgcacagcatataagacacgctgtacgccgtaaaatcggggctttcacaggtaatcccatcacggtccatgtgggcgcgggcaagctcctgggccagcccccggaagatggtaggggcgtccaacccctggcggacatagacggtatgctcctggggatgataggccacattgacgccctccggcagttcgttggagatagcaaaccggcagggggcatcgttcatcagggccttcagcagcaggcgttcatcccggaccgtggtgggggcggggcgctgggcggccctggtctgggaaatgtcaaagaccttccgcacattgtaggacacgcccacgctgccatcgtcccgctggtactccttacccggttccagaatggtgatagcatccgctcctcgccggacatacacgccgttggctttccagctatcgaagtcggccagtttggtggcctccgggcactgggccgcgatcaggatggcgttgctcacggagtagaggtcaaaccgggcctgcacatccaggtaggcttggaacagcccgccctctctgcccatatcctgcacatagctgtcgatcatggcgtagacgccctcgcgctccgcctgctttcgcgccgcccaaaccgtcttgtcaaagggcttctcctcctgctgggtgggctggccggtaaacagatcatcatagttcggcatacattacctctccttttgctttttgattttcttttttgggggtgctttgtgctggaccggcttctgccgtccagcgttctctctggctttctcctccacccgctgcttctgctccgcccgtatctccttcaatgcctgacggacagagggacggggacgctccagtggatcagggatacccggctcggcggcctctttgggctttgaggtaggctcggacagacgggatttctcggtccggcccacggtggggttttcggtcctgccctcctctctggcagaggacgcgccccgcgccgccttcaaaaactcatccaggtcccggtccggatcgtcgcgctccggaacaaccgggccatgttccggggccggggcaagcatggcgtccagaaatccatccatctcccgctcagtcatcggctcctggggagtgtccaccccggctgccggttccgccgcaggtgtttccggggcgtccatccgccgctccacccggctctgttcgatctcctgcttgacctgggccatatctacggtggcgaggccgaaccgctcaatgatgcggttgatcttgccggcgtcctccgccctcgccatgatgtcggtcagtccatccgtggcgtcccggtccttcaatacacagtagaggacgccgtacttttttgcctcccggcaaaagagcttgagatcgctgtccttgacggcaaacaccttcagctccttgccgctgcggagcatattggtcagacgggccttgcccgctgtctttttctgctcccgcaggatggcatagatcaaaacggcaagctgtttggccccggagccggccagcctgaccgcaacctcacctgtttccagcgacatcctcacgacttgctccgccgcgtcgcctgaataactcattctttaactgctcctttcgctcaatttccttttgcttcaccagccgtcccaggttcccccggacctgcccggaacgctgggcgatgccgtcacataggaccacctcctttcgcgccgccctgatcctgccggacagggaacggatattctgtttcacctcgtcaatacccgcggagtcgccccgcctggtgagccggcgcaggtcctttcggagttcctgccgctgggcggtcagggtgtccacctccatcaacgccgcttcccggtgggcagtcaattcctccatcgttccgatgtggtgtttccccaaaaaacgggtttcggcgtccagccggtccagcttggcgatgtcctcccgtaataaaaaagacacccgcttgacggatgccggacgcttgacgatgatgtggagttcgtagcagtagcggaagtacagcgcccgcaggccggtgactttcttctggggctttccccgtacccggcaacgccggggcgggtgatggacaagctccgggaacgggggctgcttgtgaatgttgcgtagaatacgcgatctgatctcctccagcgtgtagccctcgcccagcttgtggaagcggaaatagccccttgcgtccgggggcttcaaggctggatatttcaggggctttccatccttcccatgggtcttgatctgatagcccatttcgcccatcacccgcaggaagtcgcgctcggtagtggaagcgcggatagcccggtcgatgtcggcccggatagtgccccggtgggtggtttttccatcacgctcggcccgccattcggcatagtcctttggctgtctgccagggttctcgatcacggaaatggcgtattcccggcacagatggtccgatacctcccgcattcgggcgtagtcggcgggagaattgtagaatttgtagccgtccataaaggacacggagttgatgacaaagtggttgtgatagtgtccggtattgcagtgggtcgccactacaacttcaaaacgcccgccccacagctcctccgccagcctgacgccgatctcatgggctgtctccgccgtgacctcatccgctttgaaggactgatacccgtggtagcatacccgcccccccgacttgccccacagccgcttcgcttccatgaactgcgcggcggcggtgtcctcccggcagttcaggcaggacacataggaccggcgctccgttttcatctcgtcggcggcatactccaccacatcctcaacggcatggagggacgccagctccggcaagccggcctcagtggtcttttccgggttccggacgtagtcgattaccttgtccacgcgcccatgaatgggccagatggaggtcacagccatgtcagtcggaaggcacggtataggtgtccgcgatcagcttctccacagcccggttatcctccagtgccttgcggagctggggcacatccagcaggccgagggcattggcccgcttcatgatctgattcaggttattccccacgcgccgcacctcctggatcagcacaggtacatcggcgggcggggcctccttcacctccgtgccgttcaggacgcggcggcagtaaccctcgcgggacaggccggacttgcgggccttcttggtaagggcatccagttccgttttggtaaaacggaccttcatttcaagtgttcttttcaaaacaatcatcctttctcaatgcagggtcataggggcggcaagcccctgtcaagcggaattgtggccccacaattcgttgcttgctaagacaataccgccatcctccgcgcctgcggcgcgtgagtgcgtgcgggcttggcctctccgttatcgctcatgctctttttcgattcgcatgagggccttcgcccgctccacttcatcggacatcatatagcaccgctcaatttgccagccgttcttgccgccgtactccgatgccatgtactgttccagacggacacagggatcggagccatccagggacgaagcatagatggaatatccgcccatattaggccgaaacgccttgttatcgctggacaccgcataggtacggctttccacggaatactccttgtcaaagctggccggagagaacacaatgaagccggacaaatgctggcgggcacgttctgctgcgcgaaaataacttcgcatggttgcataggtcatattgacctcacaaagggccttttcactcatggagtgacaacctcctattatgatttttgcggcatcataggtgatgccatgcccctcgacgggcgggaaaaagcggcatcacaagcgatgccgctaaaaactgttcaagaagtcaaacacggcgtttaggtcctccgtgctggcttctgcctgcgccgctggccggtcatagccgttctttgtggttcgctccaattcttcagatacggtctgacggatcaactctttcaacacatcggtttgctcttttgcgttgatcctggcgatgatctcctgattgatggatcgggcgtccatgcggtgcagggcttcccacgccctgcgatcattctcccggtcaaggttaaatcggagcgaaaaccgtttgagtttcatccgctcacacccctgtgcaaagcctgctcacacaggaactcatagcccttggcggtggcgcagatgtcctcgtagatggtcacgcggtcggcgtcatacgccccgaagttgcggaccaggcagcttccgccgcccagcacatggagccgcatgagagctgggttgtactcacgctcccgcaggatgcggaaaatctcgcccacatactctgcggcggtttcccggattgtggtcagatagtcctcccgaatatccgctgtgccgaaccgcagcacccggttgatgatcgactcgtccaccgtggcatggtgggtccgcatgacattctcccggacggccagcatacattgatgggtgccatacttctcagtaaacatccggtccacaacaggcttgcggtcgttgatgaacatgatgttcatggtgccgttgccaatgtcacagagcatattcacgccctggaagtccctgatctggccggccaccgccgcgaagccctggggaaacacatccaccccggcgatctccacccggtaggctttcccccggaaggtaaaggccagttcccggttccgcgtgaggtaggctttgaaatcctcccgttgccggctcacccaggtgaggggcaatcccactgcaagatataccgtggcgtctgtcaggccatatacattcagctcacgggcgatagcggccagggtgaggatatagtagtcatcgtccccggtcttgtccgccttaaactccttgtggcctgtcccaatcaggtagtagcgtccgtcatagaccagcagatcgtctttgaataccggctctgcgtcatgaacggtcagccccgcgggaaaacagcagtttgcagtcttgatgttgccgtagccattgtctatcccgatgatcttcatgccctgatgatctttcaccggctccattcctccttcctctttgcctgccccaacctccgctggagcagcagatcgtttacatccttgccgctgggcggcggcctgtccagcacttcgtatctgtcccccaggccagccatgatacccgctgccgcgtcccggcccacctcgtcattgtccaggtggaggcagagcgtgtggacgccggggtggtcctgaaggtactggctgagagccatggggatgacaaactcttgtttctgcttgaacaccccgcccagggagagcatggcgtcctgccgccagtcccggcccttcattttcagcagggtggcgtagctcaacaggtcgatggccgattcaaacaggtggacgctgggtgcagcggggtcctccgcgatggcaaaggaataccgcttgtcgctgccgggggcctcgcccttgaagtcccctatgataccccgcagggcggcgtaacggggctggccctgccggtcccggcccacgaatacggcgttgtgatagggcagactttcatacaagcgcccggtctggatgcagtagtcgatcatatcatagtcaatgccccgcccatgaagatagctgacaacatgggtggcgcaccggctggcttggggaaggaccagcttccggggttcctgctccttcggcctggcttgaggcgccggagacgggggagagaagttcggtcccgtcagggcctccactgcctcggtaaaggaaaagccctggactttaatgagatagtccagggctgttttcccgccgattttgcgggagaaccagttccattttccgttgctgatcttcaagctgtcatgctcacgagtgcagtaggtacttccgcccacatggacgagctggtgcgggtcataccgctggaggtaggtcagcaggtcccattccttagcctgagcgatctgctccggggtgacatagcccatcctaccgttcctcccgctggcccttttccttttcagcctgtatgacagtatctgcgcgggcctcgatcacatcccgcacatcgtccatgtggtgagtttccgcctgctcccacgcccggtaaacatccgccagcggggtccgggaccgcagcagggccgcggcctgagcgtccgtcagtttcagcacctccatctccatcacaatatcctctcggaccgtgtatttgcaggcattgtccaggatcacattggggggctgctccagaagccacgccttatacttctgctgctcggctgccatccgttcataaagttggcgcatcatttcttcgttggtcatgctgtatcactccttataaaatagtgatagccgggagatctccagatgaaaacctcccggctatgtaaaacggcaaggccgcagacacggccttgccaaaaaggtatgtgattgctttatcggacgtcccggtctttcccggctttgtgttttgctggcagaggtccatctttcgcctgctctaatttttccagagcgaaatccagtatcttcgccttccgctccgccagcatggtcagataaaattgccgctgcaaatcactgaggaatggggtgtcataaatcaacttcccgattttatccatgtcgatccgggggacgattcgccgcaaagcgcggttgcacccttcatcccgcagcgaggaaataaaatcgaaataccggattttctttccttccagcgtaatcgcggaggtcggtatctcataaattcgatggtcgcggtcgcccttattggtgaggacagaccgcatgatctcgtcatccgcctggggacatcccttctttctcagctcatgcaggcgctgatacacctgactcagccgccggacagcatatttgagctgttctgccgtcccgtaaccgctgttgaagtcacgggcgatggcgttgatctctcggcctgcctcgttcataaaggcaatggcctgccgtgtctccgcctccctgaacaggacggggcggttggtttccatctgccgcatcagccatgcgctggcggacagtccggcggccctgttccgtttcttcaacagatcgtattcctttgcgctcatgcggacacaggtgcggtgtggttggctattgccaaaccttattttccgaggtaccaatgttgttccgaaatgctggccggaaatggatttttggcaacgctgtcagaagtccacctttccccacccaaaatcgcttttggcaatattgccaaacccggtttcctagcacaaacttgccggcagtgctgccaaaaagtcccgtcgattggcggcattggggtcaggggatttcccctgcaagtggcgttttgacatcaaaatgcgatgcttgcgccaccaaaggtcccgcattgcgggacctctggcggtctctccgccacgggcggggttttctcttaatggagagcagaccgtctctgtatagcacttatgttttgaaaaaatgggtctggccccaattttctaacaaacatttttatcgtctctgagaaatttaacggccggactgaattttcaatttctcttatgctttccgatcgatcccttggtgatattcatttaagataccgggcttaactggctttccccaattccaagacgggtcccgctgatgcacatattctcccaaacgcttagcctcttgtatactgatttgatttaatgtccatccggcagcggctctttcttcaggaggcaacgacataatatagttttttataacttggctttcaacttctccatcactcattccgccgttgtttttcatgttctcaaacaccagtgctctgatcctgttcgcaacgtcctcgtcaacaggaacgatccgacggaaatccgtccgacctgtaatatccattccttctgggcaatatgggttcacgtggtcctttggaggcagagagccgttgggaaggttttgcgtaacgccttgccgcctgtacctgtccgcatttgccatcatcctggcaatatcgctgaccgtcatcgtttttcctccttctgtcttattgtttagaactggtatttatagaatcgactgactaagaaaaaccaaatactgcgcatatcttttatttaaaatatcgacagctctttattaaaagtttagtgtgggttaccagtaaaaagtaaatcatttggggaaaaatccatactttctactgttatctatgtatcatgccactcgcagcccttcgctccccgattttcccatgccctacactctcgagccgcccagtatacagcagcagttttcggtaactatcattttcaaacatttgtttcaacaactaccgcatcagtcatgattgaaaaacatcgtggtgataaggatagctgttttgaaagcccttaatggcttgcgaccatctttatctgtctcatatcggctatgctatctacaataacaatgctctcatgcggttaaaatattgcccttgtgcgggggtaccttaactcatgtccgggttcttcttcaccatagacggaaatttcagcatatattgctccccgtcatagaggacggaaatcttcttgccgtttgcgccggcgtatgccttgttccgtttttgcatatctgtaaagtcaatgacgcccatgcggtcactccctttccatccgcagatacttttcccggagataccacgcctgttccgagctgatgacctgattgacctccgcgttgttgatgtctgcctgcaagttgcagtagtcgcagtcccagcgcaggtccttctcaccccggtccagccggtcccaggccgcctgcatctgcgcgatggactcccgcaggaagtcaggcaggccgcactccagataactcttgtcagctggtaggccggtatcgtgtccgggctgccccatcatatcctgtcggcccatctcttaccccgtcctttctgcttcattttccttattgtatcggtacgccggatgcttgtcaatcgctaacgctccccgtagccgggaaaggtaacatagaataccttattcatagacgaataaacatcgtgtcaaagtcctcaaacatgaattgtattttgtcgacctgtttccgggtgtggtagtggccgcagtaccattttttgtagtccaggcggtcctctatgccgtccagccagtcctcggtactcttgtctacggagctttggtcaaggctggagagaaatacttcggtcggctcatatttgcgggggcaggtgtggctcaaaacaatgtcgatgttccagtgtaaggcggcaagccgcgcttcaaccacggctttgatctcctcgtccggctgctcatccggccaccaatgccacccgtgcgccagccggtagtgcttatccacactgtacgcgcccccgatcacgatacacttgtacccatcgaaattgtaaatctcgccgtcaacagcaaagaggatgttcggaaatgcttcctcatagagaattttcccgccgcagtattctccttccgtataggatgggatgcgctggggcctggcttcatggttgccgtggatactgaagaatttgaccggaatggcgctggcatactcttttgcgcgggtgtcgcggtcattcaggtaataattgaaaccagcatcaccaaggatgattatggtatcggattttgttgtttccattgcgcggcaaaaggtgtccacgcggagaaagttcccatgtgtgtcacctgtgagataggttgccatagcattcaactccattctatcatgaattttgataccgtatacaggtgggcgtgggacacccatccgcggaaatgatacaacaaactatgtacgggggcaagtctgcggcttgctcccgtatcatgtttttgagggtcagacatttctcactctttcagcgttcgcggtcgggactaccacgggcgggggcggtgacttcatcccctacatctccatccacgatctcgctctcccgcttgtccatgttcagcaggatgttcaattcatccaggcgggcggactttcttttcagctcgtcctcctggggaaagggcttatccacctccagtttggcgttttcgagctgcatcctggtattttccaactgttcccggcaggtgctgatccgctcctccatgctttccagcagattgtccaggcggagaatgttgccaaaaacatctgtgccgaggttcgtggtgtagtacagcgcccctttcagcgtgaccttgaactccctggtcaggcttgcaaaggacaggtccatagaaaagccccggtactggcccagggggacaggttcggggctggtcatggctttgcaggcggcgaggatggcgctgcctgcggcttttttgtcggtgtagacggtcccctccacctccatgggggagaagccgtcctcattggggtgggtgttctccttcagccggtccatatcggaaagataaccctcgatatactgttcatacttggcgatctgctggggcagctccttgatgatctgatcctccagagcgtaccgctggctaaggtggttggctttcaggagccggagccgctgcacatcaatgtccaggtccatcttctccttgatatggggatttccggtgcagagcgccttgatttccgcatatgacagggcggtttcatctatatcctcgcaggaccggaccggggatttgctggtcatgatctgcccgatgaacttctgcttgccctccaccagctgatagaggtagctgtcaaaggtgttctcggtaacataggtatagatgtccacctcattgttctcgttgccctgccggatgatccggccctcccgttgctgaaggtcggagggccgccaggggcagtccaggtggtggagcgccacaagtttcttctggacattggtacccgcccccatcttctgggtggagccgatcagcacccggacctgcccggagcgcaccttgccgaacagctcctttttctgcgcctccgtgttggcggtgtggatataggctatttcttcggctggtatgcccctggcaatcagcttattccgcaggtcatcatagacattctgaaattccgccatctcgtagccgccctgctcgtttgggaccatttcaatgggccggttcttgccaggggtggagaggtcgcagaataccatctgcgcggaacgttggtccgctgtgcgctgccatatatcaaacacatccccagcacaggcgttgatcttgctggtgtcgctgtccgggagcaaggggttgaggagccgttggtccagggccagcttgcgcccgtcgttggtgataagcagcatattgtcctcggtgctgtccaccatcctattgcggaccttctccgcccgctgccccagcgccgccaccatctccttctgctgttccgagggttttagcacgatgttgtggtagttggccttggggacggggaggttgagcatatccgccgtctggatgtccgccacttctttgaacatagacatgagttccgggaggttgtagaaccgggagaaccgggtcttggcccggtagccggtgccctccggggccagttcaatagcggtgacggtttccccgaaggtagacgcccaggcgtcaaaattgagcaggccgtgttcttccagggtgtggtactgcaaatacttttgcatggtatacatctccaccatggtgttggagatgggggtgcctgtggcgaacacaacgccccggcccccggtcagctcgtccagatagcggcatttcatatagaggtcgctggacttctgggcctccgtctggctgatgccgcccacattccgcattttggaaaaggcggcgaggtttttgtaatagtgggcttcatcgacaaagaggcggtcaatgcccagttcttcaaatgtgaccacatcatccttacggctctggtcgttcaactttgctaacttggcgtcaatggacttttttgtgcgctccatctgcttgatggagaagcgttccccgtggttggctttcagttccgcgatgccgttcaggacctcactccgctgctgttccaggagataccgctggcgctccacactcaccgggattttctcaaactggctgtgtccgataatgatggcatcatagtcgccggtggcgatcctgccgcagaaccgcttgcggttcttggtttcaaagtccttcctggtcgccaccagaatattggcagaggggtagagctgcaaatactccgacgcccactgctccgtcaggtggttgggcaccacgaacaggcttttttggcacagccccagccgcttgctctcctgggcggcagctaccatttcaaatgttttccctgcccccaccacatgggccagcagggtgttccctccgtagaggatgtgggcgatggcgttcacctgatggggccgcagggtgatctccgggttgatgcctacaaatttcagatgacttccatcgtactcacggggccgtatgctgttgaatttgtcgttgtagagccgcgtcagccgctccctccgggccgggtctttccatatccagtcctggaacgcttgcttgataagctgctgcttgccctgggcgatagccgtttccttcttgttcaggatgggaacgcggttgccgtgttcgtcctccacatagtcaaaaatacgcaaatcccggagattcagggtttcctcaatgattttgtagccattgacacgggtggtgccgtaggtgttctccgccttgacattgcccctgtcggcaaatttactttcgatattccatgcgccggtgtgctgggagtaatggctgcgtatcatccgctgactgcggggggaagtcccgaacagttcatagataaattggtcaatgacctctgtgggcagccaggtggcccccagccggacggcgatctcgctggcggtcaggtccaccggctgcacccgttccaaagcctggacatgggcggtgtagtcctccgggtacagttcggcgcttcgttttgcccattccagcttctcccgcacattcccggagaggtattcgtccgcagtgaggtacttttcctcggagccaccgccatacccgtgcatggggttcaggaaaatcacgccggtcaggtcggcgtagacctcctgctcggtcttgccggtcagctccgccatatagtccatgtccacctttgccttttcagccagtgacacggccagggcctcggacgcggtatctacatgggtgatcgtgatcctctgcttgatggtgcgcttgataaacatatccgccttgcggacaaagttgcgctcatcgtccagcacctccagggaggtcaggaggaagtaggcgctgtccatgctgaacacggagctgttggcgcgggagttgatccgcccgtacttgtccacaaaggcgtcgtaaagagcgttcaacttccgctgctgggcctgaatgtcctggtcgggccagtcctcggtttggtactcaatgagcgtccgcacacagtcccgtatgccgatcagccccttgatgcggttggccgctgtcacggacacctctatcgggttcatgcggctgttttcccggtagtacaccttgccgtccacgatggtatagctgaaattccgtacctccgggtccgcggggatggacttgtcctcgccctcggtttccggatcgtccatgacatactcggtgatggagccttggatactctgaatagcaacggcaagctggtcctccaggtcccgcccctcaatgggcaggcaggcggtttccggcccataggggccgctgatctcccgcatttcgcccatgaccatctccgagtggtcaataaaatactggttcatttttagcccgttggcgtcggtgttcaggtgtacccaatccggttcctcgctggagagggcgtcccgcttctgcaaaaagaggatgtcgctggtcacatccgttcccgcggcgtccttgaaagtgttgttgggcaggcggatggcccccagcaggtcggcgcgctgggcaaggtacttccgcacagtgggggtgtccttgtccatcgtgcccttgctggtgacaaaggcgatgacaccgcccggcctgaccttatccagcgtccgggcaaagaagtagtcgtgaatgaggaaattgtatcggtcataccgcttgtcgatcaccttgaaggagccgaagggcacattcccgatggcggcgtcaaaaaagctgtccgggaggtctgttttttcaaacccctggacagcgatagacgattgttgatagagttgctgggcgatgcggcctgagatgccgtccaactccacgccgtagattttggagtccgccagggcctccgggcgcataccgatgaagttgccgatgccgcaggacggctccagcagatttccggtctggaagcccatattcgtgagcgcctgatagatagatcggatgaccacgggcggggtgtaaaaggccgtcagggtggactccctggccgcggcatattcctcctcggtgagcagggctttcagctcggcgtacttgctgtggcgctcgtcaaagcagtctgccaaaccgccccagcccacataccgcgccaatacctcctgttcctctggggtggcaagccggtcctcggcctccagccttttcagcaggcggatggcccggacattgttgttgaaccgctccccaggggttcccccgcccagggcgtcatcggtgatgcggtactcatgccggtctgcgttgggaacttcaggatggaggacaaagggggaaaccctggccctgcgctggggctggggtggggccagagttggctccttaccgccctggtcgtgcccatctgctgaactttccgcgccctttcccggtcccgctgtcttttcagccggtcccatcagacgccgaatgacggaaatatgctccacgcgctcgatggggaaaccaactgcgccctcaaaggtgagatcccgcagggaggcccggccatcctcgtcgatcttttctacacgaaaccgccggccctccagcgtgatctccttaccgagcaggtcacggtccgaagcagccgtttccgtatcctcccgcggaggcggaggttgttcctcttttgcggcgggaggttccggtgtggggaagtccccgatcacgcggagccacttcttctccagcaggtcgtagacagccgcgccctcgtaggcaaagccgtctggttccatcgtgccttccagatagccccgtgccgcctgttccgcttcctccggcgttgcgtattccagcttctcgtccatgccgttttccaggtggtggtagaccaccacctgataccgatgctccgcttcgtcccggtccgccggggcatgggcgggcggcttctcccgtgcctggaccttttgggccagagggcggtccgcataaagttgtttctccgcctcctccagtttggcaaagctcccggtcgtgggcgtcaccctgccggaaatgaagccgtactgattgcagaaggtcccgttcggttcccggaagatcacaagatgctcgtcgccggaccaatattccgcggcctgccggtacgcgaggtcttgggcggcgatggggtctttttttgcttggggacgatgggtataaagtgctgcttcggcctgctcaaaggtatcaaagccacccgccgttgcatacaccgtgttatcctgatcgtcatagcagtattggacataatactggccgttggggtactgccggatcaggatggtttcgccctccccataataccgggcgagggggttcacctggttcaactggcgggcgtactcctccgcctgccaccggctggtaaattcctcactgacgccctcatcatccacataaatctcatctcgaatgttgtcccacacagcgtagccgttctcagtttcgatgggggaaaagcgttcatcagactgtggcgcacgggcggaagcctgttccgcatcggccatgacccgctgaataaaggggtcggcattcagtttatccgggtcaatgacttttccgtccacaatgcctctttctgcaagagttctgcggatggcggcggggtctatctccgggaaagggtcatcctctgtctgctgcacttccgtctgctttttctgagtctgctgtttgttgtactcctcctccgcaaaggccaccatctcgtcaaaatccaggttggcgagaagttcattcaggtcatggaagccggcgcattggatggaagcagcctctgagccgtccaccagataggacaggcggaacgataccaagtccacactgatctctacggtgtgggcgctgtcgctggtggagctgaacgccagggggacatgagagaggtcggagaagtcggcctcctgctcaaagacctccatacagtaagcgttaatgagccattttgcccgccccaactgcgcctgcgccatgtcaatgacctggaagccctggggcggcgggtccagttcggcaaggaagtcctggggaatggtctggccctggccgtcccggtagaggacgatccgcatgggcgcgccagcatggttttcttccttgattgccgccacaaattcctccgcgccggtgtactccacgctttcgcccacgctgccgttcgtgcccaagaagtcgatccgtcccacgggcagcggggcgtccggcgattccccggcatccggttcttcggcgtcagccacgggtgccgcgttctccgccacctgaagcagtctgtcgttcagcgggttctccgccagcagacggtcgaattcctcacggggcagctccttattgaaaataggaaaggtcgggtcatagagtcggacggtctgctcattataggccaacagctcatactcctgcgcccccaggtacaccgtgacacccagggttaagcggtattccttttttggagggggcggcggattcagctcctcctcggtgggttccagcggtgtggcaaggggaccgctcagatcagccagcacagcctcacagcgttccgtcaggtgggtcttgtcccggatgatcgtctgcatggcgtttcgcagggtaggcaggacaaagagattatctcctgacagaacatagcacttcttttcccctattctaaaggagttcgcacacgttctggcaagtaggagttccttgtatgggtccgtttcaccggtccgtgttttgaaatccacataatcatcaatgatggagcaaatctccgctgcgatgtcccaacgggccttccgctgctctacctgtgcccggtattgcggataatgctctttttccgcccggttcaggtagcgtccagcggcaatcagttccccaatacgcttttccaccttggcccaggtcagcaggaatttcccgtcagggtcgccgtagtcgcgggagatggtgatgcccgtgctgtcgtggtctaccctaaagccgctgctggggatagcgttggaataggagcctacgccgtattccactttcaggaatttggcattttcctgtctgctttcctgcttctgatactggtcatagatgcggagtttggacggtgagtaccttccgcacagaacatagtcaatggcctcctggggcaaaataaaagccgaagccttttctgcttctgcctgttctatgagagagacttgttccgcttcgctgggcagggggcgctcatccgggtcgagccactggtgcagcaggatcatcccgtagatggtgtcggcaacatggggccaccgaaggaattcctctttctcgcgggagaggtacgtcccgcgccagaggttcagcacatcgtcccatgcccgatatccggcccgctggccattgctcaaaattttctccacataggtgttgtcaaagaagcccttaatgaaatcgccgcgctcttttctgccctcatgggcttcaaagaacgcggcgatctcggtcctatggtcttttagggcgtcgctgatgcggagtaattcctgtttctcgctgtcctcatgatagtaggggatgtccgtgcgggcgtcaaaatcatggtggctgttttgaagtccggcagtagcggatgtcccgtcaacaggggcctgtggaagttcttccccagcaataagcgggccgcttatgtgtccgcgtagaccagctctgtcagcgccacttcctccgcggctgcccggatgttgttcatcaggcccacccacttcatctgatcgctggccttcagctcctccgtcacgccctgctcccgcgccatccgcgccatcaactgctccaccatctccgtggcctgccggtcgatcttctccagatgggcgttcagcctgccgctgaggagcatccccgtgtagtaggcgttcctgtgggtctgaaggtaactgcgccgcagcatcccatattttccgaccttcggggcctccggcgcttccagattgggcagacggtagtcgccctctgttcgatatgtcagttccatgttcaatgctcctttcctgttttgtcctgctatcatgatacggcctgtttggagtttgcgcaaatgtgcgattttccctttgctctgcccggtacatgctcaaaaccgtgctggcgatctcccgcaggggcatttccgcaatatcgctcaccgcgccgcccaggatggacagggtttccggggtgtcaaagtcatagacatgggcgaaatcctcgccgctgaaatagtccatggggtcgatgccgcaccgggtcagcatgataaaagccacgctgctctccaccaggcccttaaaccatgcttcggtactgaggtcatccagttcttctagcaggctgccctctttgatgccccgcagctccgtgaggtagtcgccaaagttgtcctccacgatgaccttcgccgtttccagaaggcaggcggcaagaccagagcggtccgggaactcgccatagctgttctccagcgcctcgatcaccgcgtcctcataccgcggctccatcttccagatggggatggtgcgcccctggcggctgttggtatcagacatatcaaagacataccgcagcttatagccccggtctgtatccaccagcagggcgatccccctggtgccctggttgacatagcggccatgcttgttccagaagtcgatctgggcgcaggcggtggcgtccggcttctgcgcgtagatcaaaagctggtcacggaaattgtacttgaagttgtgggcggcggtggtcaggaacgccatatagttcccgctgttggcggaaatttcgcgggtcttttgcgctgcaagctctacaatagagtccagttttttcgccacgctctatccctccgtttcctcataagattgcagcaggccctttgctgccgcggcgattttagagatgcgcccggtgagctgggcgacggtggccctgacctctgatcgtcgcgccgcgtagaagtagcctgcatcggcgctgcaaatggggtggctgtcacagcgcaggcggttgaccgcccgccgcagctccgtcccgccgacatgaaacgcggcctccagctccttactggaagccgcgttctcctgccctctgcggtactccttcagatacgcgcacagggactcgtcaatgggtacgcccttcattggggatcactcctgcttcccaccttcaactttttgtgatattcctcgctcacatcatagttgagggctgcggataaaaggagctgccagatcatttctcccgcttcattttcatacatacacagactggcgtattgttcgccgtctttactcatatagagccgggtaaagcgcatacgtttctccatcaagtccttcgcaccgcttcggacgctctccacgggggcgttagcggcgttgtatgccaggacagtcatcaacaggtcaaacatagaggggtgtagttctaatttggtgttgggtatttgtgccatcatcgtcctacctttccacggaaacggcctgccggggcttgggaaaatcccagccgtacaccttgccgatctcgtctcccagcctgcgggtaatccgggttatatcggatcggacagcctttccgtaatacagtttttctttcagcaagtcaatttgtgagtcccgtgctccgggcttataggtgcggtaaagaagatggttcgtaccgtcgtggtgtatggcgtcgcagcgcaggtcgcccagcttatccacataccatgtggcgtattcaatatcccggccactgtaaaggcagtcccggatattgccgctggagatctcctgatagcctgtacgccgcccattccaaagtcccaggtcagcgatcacaaggatgggctggtcaagctggatgttcagattgacgcgctcatcgtccagatagcggttattgatctcgtacatcagggccatgcgctcgtcctcggtcagctccggatgatcttcctccagatcgtccctccagtcctcatagtccagatcgtagttgctccatattaagtgcctttgctctgtcatcgtgaaccgcccctttcgtggcggcggggcttgacaggccgtcctcgctcgttgtagcggttcgggtcagcggcaggggaagtccagccctgggtcaccccggccagcatcgccgccgcctgcgccctggtcacgcccatatcgccgttgagcacatccgccgtctgctggggcgttttccctttgaaatgggccataggggacacctgatacccaggcttataccgctctatggcgatcagctcgccggatgatggcaaaatggcaaagcacttctccggcaggggtggtgtcagtggcaggacggtgttgtggcagcgttccatctgctcggcaaactggcagatgtgaaacaggctgtcccagccgttgcctacctccacatggcagtcatcaatatagcggcaggtccggtcgatgggcgcacagccctcccggagaatacggatctgcccgccgtccgggatgcggaacagctccttgtagtgcgggtcgatgaaccggatgcccttttcagcctgttccatgtgccggtccagccagtcgcggcaatagcagtagagaaacagattttcctcccccttgtaggggtgcagccggatcaggtaggcatactgtgctgtgtccgcccggaagccgaacgcaaagccgttatcgtagccgctctcctggtgtccccggcagaaatcccgtatggcgtcacggcttttcagaaacccgccgtactgctcgtcccccaccagggcctccaaaacctcctcaaactcctgttgaaagtcctcggtgtccaggctttcccggtggctggtccacttgggaaagaagcccttgccgtcctcgcccatatccgcttgaaggtgcccgatactcccggtctggccctcaatctgtgtgctttgtctggcaatataaagccgctccgctggggtggcggcgcgaaaagtcaattccatacgatcacgctccttgtcaacaagaaggcggccatcagcttctcactgatagccgccttctctctatacgatattgatagacattctaccgggcgtcgccccggtcatggcgcttgggcttgatgggctggccctgctcgtcatagtttttcgggtcggcggctgccacctcccagccgaacagggagccggccagcatcgccgccgtctgcgctttggtcacgccgccgcgctcgttacactcatctacaatggtcagggcctccgcccggtcgtgtccatactgatctgtgcggtaatagccgctctcgccctttttgacaataatgatctcatcactgctgggcagtacggcgtagcacttgtccggcagggtggaacgcatggggatcaccctgccgcctgtctgctccagccgctccgcaaactcccggataggatagacggtgctgccccactcgtgggacagttccatgtggccggcgtcgatatagcgggcggtgcggtcacgggtgccatctccgcctgtgataatgcggatctgctccccatccgacaccctgaatttctctttgccgtccgtggtgacaaagcggatgcctttttcggcttccttcatgtgccgctccagcaggtcccggcggtaagcatagatatatgcgttatccagcagctcggatggcgtacaacggagtagataagcatggtagccggcatcaacgcggaacagatattcggggctttgcatgatgcggctttcctggttgttcaggcagtaggcaatcatcgcggggatattcttcagcacagggccatatcgctggtctgatcggagcatttcaatcatggcatcgagttccaccgagaactctggtgttttccatgcggggtcccagatgtcccaatggctgtaaaacgccgtgccgctatcgtccaattcagcaactaagatacccggacttccgcaccgctccatgatcggaatacactgccgcttggcgtatagtcgttccgtgggtgtcgcaggccgcaaagtcagctccactatcgctcacgctcctttaccttcggctgctgtgcaggctgtgtcagtccggcctcatgcgcccgccagtagtcgggatggcatacccggatagtatcatcaatacatttgctgtattctccggggccgaagtattcattgaccggcgcggtgtaaagcccccggtccatcagctcccggaggacgatctgcgcgtcactgtcctcctcaaagcacagatagccgccttcccagaacccgtaccgctgggcggcaggtgataaattcccggtcacaaattcccgcgccaccatgatcccgccatggctggctgtggaaacatcgaagaaaccagggcagagggtcttgcgggtctggataagcccccagggagaataggccggctcatagctcattccagctcacgctccttccccgatttctccggctgttcgccggagcgttcctgctttgtcatctggtactccagttccgccccggcccgttccagaaggtcctttttcgcggtcaggagatcggagtgatagtggccccaatagtagtaatcatttccctggcaggcccatgtcacaaacatggattgttccgttatgctcacacccagcacgaactcggtggtcccgatgtggatggagtcggtgatgagatagccggcgttcatacggttgcccatatcagcggcaccccctgtcacgagagcttcgttccttttcagcctgtcgcagctccaggtaatgctttgcccatttgggcaggtcctccggggcgatgacgccgagaatgtcgctgcgctcaaaccgcgccctctgcccggaatacagctctgtgcagaaacaggcagtgccgcggctgttggggtatgcgccggagccgctggtacacaactggagctggcaggtggcgtggcggtattcccggcgcagcacctccgggcggatcaccacgactttgccccggatgtcctcctggtaactgacctgtccacagtcctcggcggtgatggccgaattggggatgccctgaattttcgggccgttcaaggcgatacgggtcttttccgcctgctccgccacacgctccccaaacagctttaccagttccgggtagtcaccgctgaccatgacctcggtatagtttatgaatatctcatgctgctggcagaacgcgcatacataccgctcatcctccggcgctgacgagttttcccccagcacgatctcccggtcgccaatgtgaagcgcatggatgatctcatagtccccggccatacgcttttcctgatctatgtccatttgaagtcctcctcgtataataagtttcaaagttaatagtttcaggtatcagcaggctttgaggtgcccgtgatacaatagctgtaggacagcagggtcaagttctgagtcctccggttgagccgtaaggctacttcactgaaagtctgttcccctgaaccggaagttagctgcaaactcattggctgtttgcctgggacaagaccgccctttcagcagtgagggctatcgcattggtctgcccaggaatgattctgataagcgagggtgccagatgctccggttatcatgggtatctcaaagcctgctggcctgaaatctccatgcggggaggtgaaaattgtgaatccactattcgttggcattgatgtgagcagcaagaacaatgtggcctacctgatgaaaccggacggcagcaaacactccagcttctccgtgcagaataaccttggcggtgctaaactgttatcagagagaatcgtatcggcacttggctccatgcagcttgagcgtgtggtgattggcctggaggccacctccatctacggggacagcctagtctatgctcttcgtgaggatggccgcttggggcggtttcagaggaaaatccatgttctaaatccaaagcaggtgcggaaattcaaggaagcctattctgacctgccaaagaacgactgggtggacgcctttgtgattgccgaccatctccgtttcggcagaatcaacagggaggtctacatggacgattaccgctacaaagccctgcaaacccttaccagagccagatttgatgtcatccaaaacttgacccgggagaagcagcggttcgccaactacttattcctcaaatgctccggcatggcccaggacaaagacattcagaacaccagcgccaccaccatcgcactcatggaacactttgaaaccgtggatgacttggcgaatgccgacctggaggaactgactgcctttattactgaaacaggccgtggcaaatttgctgacccggatgctaccgccaaggcagttcgggctgcagccaaaggctcctatcggctgcccaaaacagtaaacgacactgtaaaccaagcaatggctgtttctattgcctccatgcgcgccttgaaagggcaggtcaaagtattagataaggccattgaacagcagtttgaaatcattccgaacactttgacctccatccccggtattggcaaggtctactccgccggtatcattgctgagattggtgatatccaccgttttgattcccaagcctcggttgccaaatacgccggccttgtctggaacaggagccagtctggcgacttcgaggccgaacactccagaatgattaaatccggcaaccgctatctccgctactacctgctggaagccgccaactccgtgagaagatgcgactccgagttccggcgttactatgacctcaaattcaaagaggtcaacaagtaccagcataaacgcgcactcgctttaactgccagaaaactggtccggttggtctttcggctgctaaaggacaaccgcctgtatatcccgccggagggctgagagcgcagcttgccactctgactcataggccctgtttcaaaatttctcagggacagggctttggttggtgttgcctttttgctgtctacacagtgctttttactctgtttcgcttaaaattttcttgcatcacctacttgacttcataccattggacttccaaaaatttacgccgctctgtgtccccaaagacaaagagcggcgtatgtaaaagccggttgtttcagccgtgagccatcagcttcaacagcaggtcgttcaccggcccagcgtcccggccctgggcggtcagcttgttccgccagttcatcaggtacatccgcacaaggcggcgctccgcgtccgtcagttccagatacactttcttttcccgtttgaacatttgaaacaactcccttctctctgcccatatcgtacaggaaagggcaaatggattcaaatgtgcgaatgggtatgtaagcggcccgcacagcgggccgcgggggatgcgcttaataacccgtccggggcaggggcttggagggggcgtagaccttcgtcacccaccgggaggtagccatgatccactgaccgtcatagacgccgcccacatccgcctgattgacgaattggctgccgcctttgacccaggacaccacggagcagtcgatcatgggcgtttccacctgccggaagttggagggcacgacgccaaacacgaacatcacctctgtgacatactcgttggaccccagccgcagggccacaggcgaggcgtccagcacatagttctgctgcgtgttcaggctgtccgccagcacacggtactcgctcccgctgagattggtcttgtagacgatcttatagcttccagcagcattgtaggtgccggtggtgatcttcgccagccgcaccgcctccacgggcagggtatcgcgccagtagaacgatgtgagagaagtcgtggagttgttggcgatgccggagaaggtgtagcggatattctggcctggcatgacctcggcatagccggttttctggatggctacattggtatagaggctcttgttggtcatggccgccttgacgatctggccctcatgctcgatctccacctcaatgggcgttttgtccaaagcatagaagtccgccgcctgggactccacgattttgtaccggcccaaaggcaagggcttagacacggccacaccgtttttatcggtgcggatggtgtccacaagacgccccgtccgggcatggtagatttcaaatacggtgccagggataggagtaccagcgggccagccgttcatagagttatagtcggcgcttgtcttggtcacctggatttggccggtgacggcggtattctcccagatgatggtggtgcagccgccgtacttcacatagacggtcttgggctgggtttccaaaaggtagccctccgcgcactcaatctcctggatggtgtaccggccatcctccaactcgtggtcgatatagacatagccctcgttgtcgctctcataggtgccgatggggttgcccctggcgtcggacaagaggaatttcacgccgtagatgcccttgccggtcacgctgtcgatcttgtgaatgagggcgctcccggtctgccggttggtaatttccaaagtggcggtctggccgtcctttacctcaatctggtagggcgtatcgtccagacggtagccctcggcggccttcagctccaccacctgataccagcccttttccgcttcgggcaggcggatgacgccgctcttgtcagtggtgtaggtgccgatgatctctccattcagcttgcggacctcgaactggacgccgctaatgcactccccggtttcctcgtcctttttgatgatggtgaggccgccgctcggtgtgttgtagaagcggagggtttggacctcgccggccttgatctggatggactttggggtgctgtccagaacatagccatccaccgtcttgacctcccgtgcggtgatggtggtgccgggggttagggcctcgatcacgatacggccattctcatccgtgatgaactcgccgttgctgctgcccactaccgcgccggagctgtcggtgacaaggaatgtgacgcctttcaatggggttgtggtgccctcgatatacttctcaatgaccagggtggtgctgggggtattggtaaaatggagcgtctgggtgtcgttggggttcaccaccacggtctgggtccgggtggcctcgtcgatggtataacccggaacggtggccgtttccgtcaccaccagcgtccccaccacaccgttaatggtgattttgccatccttgtcggtgaagtacaggccgttgctgctgatctgcccgttttcatccggtacaaactcccctgtggaggtagtcactttgaaggtgacgccctccagcggttcgccggtgagggagtcccgcttgtcgatgaccagcgttccggccttggagtttttcacaatgacggtctgggtatcgccgccctccccgatgaccacattggtggagggtgtatcaatgacatacccgccgtccggggccttgatctccgtcagtacatacgcgccgggggccaggttggtgatcttgatctcgccctgggcgtccgtggtaaaaatgccgttctgcgttagggtgctggtgccgatcacgccgtccagtcccacttcgcaccccgccgctgtcgttacccggaactccgcgccggggaggggctggccggtggcgctgtcccgcttctggataatgagagcgcctttcggctggtttttgaaggtcagggaaacggtgcggccctccttgatctgtacggtctggctctgggtgtccagaatgaagccgtccggggcgcgggtttccgtcaccaccacgcttttgccgggtttcagaccggggatgcggatctcgccgttctcgtcggtgcggtagacgccgttgctgtctccaatcagggtcccatcggcatacatgaccttgaactcggcgttgggcagggtcacgctggggttggtggcgcagaccttgcggatcagcaggatgccgtccggcgcgttgtcaaaacggacggtgacaatgctctgctccccgctgtccgccaaatataccgtttcagatgcgttgataatggaatacccgtccgcagggtctacttcctccacgatataggccccgcttttcagcccggtccaaatggcggtgccgtttttcccagtcactttctgaccgatggtggtgccgcccgtgccgctgaccccacccagatacttcagttggaaggtacagccgggtagggcctcgtgggtcacgctgtcgtacttctccaccacaatcgcgttgagcggttcgttctggaatgtgacagtcttgctctcgcctccatggaggatgatggtctgcgtggtcggctctttcatttggaagccgggagccggttccacttctgtaatggtaaactcgcccggatagagccgctttccctgctcatggagcttgatttcgccgttggcgtctgtcagaatttctccgtagtcgatggtggcgggcgcgtccgacgcctcgccgttgctggtataggtcacatgaaaacgcgccccctccacgggagcgccggctacgctgtcctccttatagatagtcagttccggagccttgtggttctcaaataccagccgcttttcatccccggcgttcaggctgaccgtctgctcccggtccgcgtccttgtccggcaaatagtagggggccggaacggactgttcgatcaccttataactgccgggggccacccgcagggacaccgtaccgtcctcgccggtggtcacatcgtttcgatagtcgctgtcaataccttcaatagtaaaggtggtgccggggatgggggtggtggagtcggcggcgtccaccttggcgatggtcaaaagaggctgtttcaggttatcaaaaatcagttcccgttcctcgccggggccgaggtagacggtctggatgggttcatcccccaccacataagggtcgggaacggatttctccgtcaactcatagctgtccacagggatatgagagagggtggccctgccatcctctccggtggtcacatcggtatggtagccggaatggatgcccttgacttcaaagaccgtaccgggaatgacctctttggtctgctcatcccgcttgagaatggaaaggctgggcagcttcttgtctgccgcctccacggtgatggtgccgcctccctccacagtggcctgatccacatggacaatgaccggatcagtcaggcaggcgaaaggcgcaggggccgaaacctccacaaaggcgtacatcccctcggtcacattagggacggtgatggagccgtccgcttgggtggcctcggtgccgatgatctggccgtccctgacgatgttgaatactgcaccggggaggggatcgccgctgtcgtcgtacttgaccagtttgacctttaccctggcgtcgttctcaaacaccaaggccacatcattctttccgtcccagtaaaactcctgcttgaccttatccgggtccgggctgagggagtacccctccgggggcgtgacctccgtcgcggtaaagctaccgatgggcagggcgtcccagggcacatcctccagatagccccccgccccggtggtataagtgcccacaaagctgttgtcggtgccttcaatcttgatgactgctccggccaaacccttggtaggatcatccgcatccaccttgcagatgctgccctcgctggtgatctccgggctgtccaggaaagtgacggtcacggtattgctgccgccattgggcaaagccacatactgcggccccgcgttgtcgatctcatagccctccggagcttccagttcaacaacggaatatgtggaggcgtccagaccggacagggtgtaggtcccatcgctcccggtcacgacctccttctcgtaggtcccgttttccgagcgcacgatgaaccgcgctccgggcagacccttgttggggttggtggcgtccacctttttcacggtcagatcgtatttctcgcggataacattcagctccccgatcataatggcctgcacatccttagcctgatgggagctggtgctggagccggtataggcgtactcatggacggtacaatcgccccatacgccctgtttgcccaggtccaggatatattgggcacggtcgcggaaggacatcccatccagcaggtcatctacaccgctgtaattgccgtggtgcaggctattataaacgcagaccaactcctcggcgcaggcggtagccgggtcattcaacagaccggccttgtagcgccagacgatagcctgtacccaggcgttcatggtccaggaatactcgctgccccatatctcatccacgcccagggcgtgggcttgatcggtgaataccccggtggtatgggcgtagtagtaggccatcatggtctgcacggtagggtcggtgatgggcttggggttgccccaggtctggccctccagggaccagcccatgcctttcccgtgctcggcacagaagccgatagtgcttttctggttgtaatcgaaggtcatctgatggagccagcaggtccccaggctgggagattcatagtggacgccattgtgggtgcagtcctccagcttgatagagctgggggcgtccgccgccaacgccgcgatgggcagcaggcccagcatacacacaagcacgagcagcagggccgtcatacgggtgagaaaacggtttttcttcatcagtgaaaaactcctttccgtttttgggcataagaaaaggccctccagcctggggctgaaagacctctccgtgtccgtgttcagttctcaattattcgtagggattgtgggtgtttgggcgacccacgaacaggtagcaataggtcacgctgccgctctctgtcacgcccacgccgatgctgtcacagtccggcttaatcatagtttcaaaatggccgggggagttgagccagttgtccagggcgtgttgagcggtgtcctccgtggaaacgccggtaaacacagtcagatttacgccgaagccatagggatagccgcaggccagggccgcctcgcattcctccttggtgtggtgccaggtgtacttcttatcggaaatggtttgggcggcgctcatcagggcctcactgacaggcagttccgccacaccgttctcccggcgcacctcattgaccagccgtaccagctccagccgcacatccaacgcctctccttggtcggggctactctcgacggtgggagcctgcggagcgtgggagccaacggtcagcgtcagggtggcggtttccccggtctggttggagacggtgatctccgcgctcccctccgctttggcaacggctgtccagaagttcatcacctgttccacctccaccgtgtccgggtcgctggaagtcacggtgcacgccgacccgccaggaccaatcaccaagccgctgcgctctcccacctccagcatggtgcccttgtagctgcctacccggatgggctgatcctccgccgcccgcgcgggaagagccagggcagcggtcagggctgtacaggcgaggactgcggtaaagcgtttcagactgtttttcatcatggaatgacctccttgtgatagattgggatgccgctgtcccaactgtaccataagagggcaaaaactgtctaaggtgcaattttcttttcagcgggtggttatgacacctccacggctcggaccgcccaacggtaggcgctctggttgcggacacaggtaaagagggtgatacagttctccgcagtgggagacagcagggagttgtccagttcgctgattttgttcacactggtcacggcgtaggtgcgcttgcccagcttggtggtcagggtgatcttatctcctacatccagcgtgtggatctccccaaaatggtcgttcacgcccctgttatgggcggccaaacagacgtttccggcccaaacgctggtgtcctcaaaatggcccgcaccctttctcagcacggcgcttcccgtcccctcatagaccttcacattgacatcaatgctggggatttttaaggtggcgaggtagccgccctgatagtagaggtctgatgtgacctccgtgaagccgatggtggggaggacgctggatgtgccgccgctggggaagccggaataatcaggcggagcgacggtggtgccggcgctgccattgataacggcaccatcgcccagcatatagccgggggccaaattgggggtcagcggagtgccggtattcagggtgtaggcggtggggctgccaaaggcgggcgggaccagagccgcgtttttgctcacatccacattggaaagctcaccacggtccgccgtggcaacaggctccaccgaagtaggcttgccatactccggatcgccgggggcggcgatgtcatactctaacgcgctggcgggaacagccagggccgcagttaggcacagcagagacaaaagcatggtcagtttcttcatatcgtattacctccgtcgcttgatgaagtagaacgccccgcctccaagcagcaccgccgcgacaacggccacaaccggaaggacgctgttcttctctccggcctgggcctcctgcccggtggaatcagtctggtcggcgggggtgttggggtcggaactatctccggcggcctcgccgggggcggggtccagggccgtgccctcgaagatcgctacatagcggattttattcaggttgatacggctcacggtgcccgcgtagtcggcggtgacggtatagcccttcacataggagctggtggcggagccggagtaggaggccatagcggtaaaatggccgtccccctcggtctgccaatccacagcctggagggtcatggaattgccaccgtcctggatggttttggggatatactgcgtgtcctggttggcaaggccgggataggtgcgggtggcggtcacggttttggtggagctgccatacccggccacctccaccttcaccgtatccagtttcagggtcagcaccccggacaggccgtcctccgtgataaactcctttgtctgcggcagcagggccagcaccgcgcccatgtccttgctcttgctgttcacggacacggtttctgtatgctggcggctctcgttggcggggagttcctgtttcagcaggtccgtgagggtgtagtggtagccgtcctgttcaaagtcggaccgggggatgccgccggggtcatcctccggccccaggtcgtacattttcctgatctcagtaccgtcctcgctccgggtgacggcggtgggatagcagggggacggctgggtgggttcagacgggtcggcggcaagggcggcaggggccagactcatggaaagagccagggcgcacagcagccgggccgcgtgggtcaggggtttccgcttcataacaaaactacctccatgtttttgattttaggcacaaaaaatcctcatggcacgccatgaggtccaacaatgcccgtgttcggttttcttgcgcgctgttctccaaaggtcttttaccggctgaaaaaggatggtcaaagcctttcttttcaactggtacaacgggtttggggggagagtgtgagagggggggagcggcaggcgtaccggggccgcaaaagggcagaccatcccccaggtgtggcgttcatcgttccatcgccctctcccgcttgcggtacagttccaaagccttcacgatagtgtcctcgattttctgcgcgggcgtccccggcttgaaaaacttgtcgatccgttccctgggaattttgaattgctccacctgattgggcttttcctcctgcatgatggagaggatcacatcagggttcagcttgccttgctcggaaaagctccgcattttgatggcctgggcatgggatggggtgcggatttctccctccatgacctccagcaaggcggtctgctcggcctccggcagataggacagctccacggcggggcgcagggccatttgcaacttgccggcttctttcagcacagaattgtccaccatgtccagcaattccgggataaggttggttaagcgaatatatcggcgtatttggtcttgactttctcccacctgctcacccaaaagttgacgagaagttttgccgccagacttctgtgccactggcacagaagttaaatccgtccgttgcccctgccgtttcatggcttccagcttcatcttgtaggcaaacgccttctctgacggcaatatctgttcccgctgaaggttgctgtccaccatgacgatgatggcctcatcgtccgtcaactcccggataatacagggcaccgtaggcaggtccgccagctctgccgcccgcttgcgccggtgacccgataccatctgatagctgccgtccggcatgggccggaccagggaggggaccagaacgccatgctgctttacgctctctgccagttccaccatgctctgatccatccgtaccttgaacgggtggttgggaaagtcgctgatctccgcggcaggcaggtcggtcacataactgcgctgggcgttgtcccgttcctcctgggtggtgaatatgctatctaccgaggtcagaagtccggctgcgctccttttgcccaatttccaacacctcctttgtcagtctgcggtaggcgtctgctgcccgtcccctgggttcatgctgaaaaatgctcttgtccgccgtgctgacctccgccagacgcaccgtggccgggatcaccgtgtccagcacgggcagacgccgcccaaaattctccttcacgctgttcacgatgtccctgcggaacgcggtttcattcgccatagtcaggaacacgccgccgatttttagccgcgggttgatctgacgctggacgctccgaactgtccccaccagctccgtcatgccctccgccgccagatagtccgcctggacggggacaagcacatagtccgacgcggacaaggcgttgatgaccagcatacccaacgaaggccggcagtccagcagaacatagtcgtactcccgcttcacactgtccacataccgccgaagcaccgtttcacggctcatcacattcaccagccctacctccacggcggacagactgcggtttcctggcacaaagtcaaagccctcatggtggtgcatgatctccgggtggtcgcggggcattgttcccgatactacgtcgttcaggacattggcaagggtgaggggcagatcatggggcttgcgctgccccagcatcttggtgaggtcgccctgggggtccacatccagcagcaggactttcttcccctccaacgcgaggccgacccccaggttgtagacggtggtgcttttgccgacgccgcccttctgatttgctacgctgattacctttggtttcgccattttggggttccctcctttcatagatttagccgcctgcggcgaaataggcggctatgtaagtgcatgaaaaagccgccttctccattcggaaaagacggcctatccagtcgggagatatgtgatttagagaacaattcaaagagcggcgctaaaccgtatgtccgcatttctctgtgtttcgtcgcatcaaagttcattccttagtagtaaattcgtagtaatttgaggggcttgttgtcaggaaatgcggtgtaatgcgctgtttcacagggttttgccagttctcacaaaatatttcgggtaaatatcattccaaaagaattatttagacagcctgcgtttagcttggagccataccgtttagaagatttttctaaagagtattttgaaataacacgaactatttcagaacttacgggaaacgacagttctgcatatgcaaatatgtgtgaaagcgtagggccctttgatttccaatttgtctttatgaaattgtcaaaccggggcgagggaccgtattattacaaggccgtaagtagaaaacgaaaaatatggatggagaatcatggcggactaaaaatctatcgtgacaattttcttgttcgtccgtatggtgatcctacatcaaaatcttttgattggcttgggctggatgcgcgaaaaggtgtcaacccagtagctatttctgacaaatccgaacaatggcatgttaataactcacaattgcaaggtacagttttaatttcgcgagtatacaacgcttccattttagataaatcaagcagagaaggaatcattgaaaatgaattctttgataccctttcatcattgttgattgctattatttcaatttttgaaaaggatcgagcgcatattgtcaaaaatataaaacagtataacgatcagcagaatcaaagagaacgggcaaaagaagaggccgctggcattgctaagacaatattaggaaaaaagaataagaggtctaaagaaaaagatgcagacacagccagcgatacggaaaaacttgctacagcagtccaaatttatcaagaagagcgtgaagaactaatctctgagataaaattacttcgagctttggctacaaatggacttatgacaacaactatggtgcacgatttgaagagtatcaatgcattattagtttcccgagtccgcggatttaagctggcaattaggcaaaacgatacattgcaaattcagaggaatctggatgacttaaagacaaatgatgaatttctgaaatcttggattacagtaatcacaactcaaaccaaaaaagaccgccgaagaagattgaaaacagatatctataaagtgctgtcagaatctcttaagctgatctctccaattcttaacaggaagatggttgaagtccagtttgccaccgacggtggagaagcatataaaaagatttttgccacagattttgatagtattatttacaatttagttattaattctattgaatcttttgaagagaccaagatttccgagagacaaattacaattagagttgaatcagatgatgatagcttaacggtgcattactctgacaatggacatggtttaacagaagcatttaagaaaaacccttatagtatttttgagtatggtactacaagtaaatttgacgccgaaggaaatgcagtaggaaccggccttgggatgtacatagtagcgtcgagcataaatgaatacaagggcaggtatactattacgaaggttgaggatggttttggactggacattactattcctttgtctgaggaggggcgttagatatgcaagagcaatataaaatcgggattatcgatgatgatcaatcaaaagtaactcaaatgattacgatgattcggctttgctgtaatgatgaggaggggcatcctattaaggaaaaatatgcaaactatgagttaatccccatagaactttcccttttggataataccgacgatatggtagagcaaattgtcgaaaaaagattagatgctgtgattattgattataagctttcctcacaaaaggctgtgtcctattcaggagtatctttagccaaagaactatgtttgcggttgtatggatttcccattttcgtactgactacctataaagatgatctgtttgatcatgaactatttgattcatatcttgtgttcgattttgcgcgctatattgcggaaaatgaagaaagagtcgaacttaattcaaagttgattgagcaaatcaaaaagcatcgagcggagatggagaattggaaagaagagctggaatcgttgttgcctcgtgcgggtgagtcggcaactgttgacgaacgtattcttgaattggactccaaaattgaacgaagcattgatggccgtgcggctatttcagtccccattaagcaagggtttgtagccgaaaagataaatgaactaatttccaaaattgatcaaataatagaaagcgaatgatactatgcttagagagaaacggccaattagaagttatcatggagaggtgtttcgtacaaataggacaaataagaagcacctctcagcagattttgggcatcgttgcgcctactgtgatgatttagatgaatatggtggcggataccgcgcatatcatgtcgagcattttgcacccaaagaaaaattccctgaattacgttatgattatgacaacttactttatgcttgtccatggtgtaaccgggcaaaatgggatatatggccaagtgataattctaaaataaatgttgtagattctgaaggctttattgatccatgtactgaagaatatgataaacatctcatacggcttccagacggatcaatatctggaatcacaccacttggcaaatatatgagaaagacgcttcaattgtacttaaaacgtcacgaaattatacataatttggacaaactcaaacgaaaaagagatgaactcaaaaacagtgttgcaaaggacaaacttcaaggtaaggaatgtagaaaaaaagaagcagctctacagttaattacagaaagtttctttgaatactttaatttgtgggaaaaaatttcccaggaatcggcttaatttttgaaagtaggatgacgattccggggtgtcatatcgtgtctcttagtagcatgaagacaacaaggaactttataaccacaatcttttctaatgctacgataagagttactaaatttctatctttgaccacatgttgaaagaatgtgcagtttgctttttctcttttctgaatgaataatggtggaggacagccagaaactccatttatgaaggaaattcagaacaaatccgcaaaaatgatttgaccacatttgaggctttatttatgcaaaacgccaaacaaattattgtcgaaaaagttataaaaaccgcctcaaaaccgatgttttgaggcggtttttgtgttaggacgtcaccttggagaacattctcaatcgggttttagccgtgttccgtgacacgcctataaaattatccgtatcgaagcccaagtatgcgatgccccaataattcaattatatcatactaaatgaaaattttcataaaatacatcgcaaaatttggggattaagttctaaatcctatgcgatacttatataaagcgcaattaaccgaataccccaaaggcaaactttctcattatggattgaatattctcagttgtatggtataattatctaaattgcttatttcggttggaacggaggtatagtatgaggatacattccataaatattcagaatttcaggaagctattacaatgccacatcgactttagcgaaaaaaatacgctatttgttggtgcaaataatagtggtaaaacatccgctatggattcgcttggaaaattccttgctgatcgcaatttcacctttaatgatatcactatttctaaacgtgtagatatcaataagattggtgaaggatggactcaagaaaactgtgatgagcctacagatttactagaatgggaatcacttgttccccaaatggatatttggttagacgtgtctaatagtgagatgcattatgtagctgggataattccgactctgaagtggcgcggcgggaagctgggtgtccgtttggctttcttccctaagaacatctctaagttatttgcagagtacagggaggcctattttgcggcacgcaaaacggaaaaggcaaaaggaaaagtggacatcaacctgtatcccaaggatttgtgcgagtttcttgaacgtaatttaaacacatgcttttcaatgaaggcattcattcttgatcctatccaatccaataaggatgttccgcaaaccactccttttgaaatggaatgttttacggataaccctctgaaggggattattaaagtggatatgattgatgctcaacgaggtttcgcagacccagacagttcagatagcagcgagcaggccaaaaggcagttatcggatcagatgcgtagctattatgataaacatctcgatccagaaaaatctccatcacctgaagacttagacatactgaaagctaccgaagatgctaaaaaggcttttgacaaaaatcttgcaattaaatttgcacctgcaatccgcgaattagaaggcctcggatatccgggggtggctgatcctaggcttacgattgtgacgaaaatgactacaggtgaagcattaaagcatgactctgctgtccagtatgcacttagcaaaaatgatgatacgctaaagcttccagagaaatacaatgggctgggatatcaaaatctgatctctatggtctttgatctcatgcgtttcagagatgattggatgcgcgaaggcaaagctaaacgggcgctggagaacgataatccagtgatagaacctttgcatttagttttggttgaggaaccggaagcacatcttcatgtgcaagtacaacaagtgttcattcgtaaagcatacgatgtattgacgaaccataaattcatcaaagagaatgagcattttgacactcaattagtaattagcacccactccagccatattgcgcgagaaaccaattttgctgatttgcgctattttaaacggctgtcagaggggtcggaaggaaatattgcgacatcgaaagtaatcaacctttccgaggtatttggtaaaggtgatgaaactgacaaatttgtcacacgttatttacagacgacccattgcgatttattttttgctgatgctgccattcttgtagagggatcagtagaaaatatgttgttgccacattttatccgaaataaatatccggaactgtatcaaagatatatatcaatattgagtataaatggacggcattcgcatcgtcttaatccgctgcttgaaaagctgtgcttacctacgcttgttattgcagacttggatactgcagaaaaagaggggcatcataaggctgcttttccagaacgtgataaaggccttatcagtagcaattatactatcgcgggttggattgtaggagaaaaagacttagacaagttgttggctattccacctaataagaaggaaattgtaaaagaaggcacatgtaagtattctatccgcattgcgtatcagatgccagtgacaattaattacaatggcactgatgaagaagcactcgcaagcacatttgaagattgcctcgtctacacaaattttcaactcttcaaggatatgtctatagacgatacgggaagtttaataaaaaatgtgagcgacaaaattaaaaaagcaagttcctttgatgaattccataaaggagtatatgatgcgctccgggatggaaaatccgaccagaaggctgagtttgcgttggatttgatttatgccgttgatcccggcgagcttacagttccagcttatatcgctgagggcttagaatggctacagtcttatttaaagccggaggagtaggataatggcggattctacattaacgaaaaatgactctatagataaccatatcgatgatcatgtcgaccaagaaattcaagattgcttttctgtagagcatccgaaatgcttctttgtatttgctggtgctggctctggcaaaaccagaagtttaatcaacacccttaccttccttgataaagatcgtggtgaaagtctcgcgatgaatggtaagcaaattgcggttatcacctataccaatgcagcgtgcgatgaaatatctagaagattgcagtacaagccaatattttctgtgtccacgatacatagtttcttgtgggaattaatcaagagctaccaagcagacatcaaagaatgggtcaggcgatctgttaaagcggaaatcagtgaacttgaagaaaagcaacttaagggccgtggtggtaaagcaggtgaaaaaagagctgaagatattaggcggaaaaaagaacgtctagagaaaattgaaaccgtaaaaaagttctcttataaccccaatggtgacaatgttggtttcgattcgcttagccatagcgaagttatcaaaatgagtacaaattttattatggcagagccgaccatgcagaatattttagtagcaaaatatccgatactgctcattgatgaaagtcaagatacaaagaaagaactaattgatgctctgcttgacgtatgtaaaaaacatgaaggtaaatttatagtcggtatgtttggcgatactatgcaaagaatctataatgatgggaaagaaaaccttgctggttgcattcccgacaattgggcaaaaccgacgaaagttatgaaccatcgaagtgctacacgtatagtggagctggcaaatgcaatccgaagcacagttgataaccagaagcagaaagcacgatctgatgcggatgcgggaatggtaagactgtttattgccccatctactgccgaaaaagattccgtcgaggagaaggttgctcaaataatggccgtagatactggtgatgatggctggaaggataaagcaacatataagagcttgatccttgaacaccacatggccgccagcagatttggcttttctaatttgtatacgccgttgaatgattcgggaaaatttgacacggcattgcgtgatggctccattgcagagctgtcaattttggcgaagatggtactgccattagtaaaagcgtatcaggaaaagaatgactttgaggttgcaaagattattagaaaacattccccattgttagaccgaaagacgcttgcagccaaaataggaagccaatcccaaattctacaaaacgcagaaaatgccgttgagtccttaatggaactttggacagataataaaatcccgtcttgttcggatgttttaagatcaatccgagatacaggcctatttgaaattggcagccgagcagatgatttattagcagagcaatatgaaggcgaaaatcaaaagataattgcactgagaacagctctgttagcttcgtttagtgaattggaaagatattctttatatgttacagacaatactcgttttgccacccatcaaggtgttaaggggcttgaatttccgagggttatggttattatggacgatgcgcaagctcgtggctttctgtttagctatgaaaaattatttggggctaaagcaaaaaccgataccgatttaaagaacgaacgagagggtaaggatacaggcattacgagaacagcacgtcttttttatgttgcttgcacacgagctcaggacagtctagcggttgtagcctacacagaggatgctaattcagtcaagaatacggcgttgtcaaataactggtttgctgaaaatgagattaccattctctaggataataggacaaagctatatcatagccatgaaaacattttttcaagaatcgccagcacatcatgcctgtgcttattacttagcattccgaaaattctgaataattctaaagagagttgggcctccggtttgccgattacccaatcgctggtttcttttgattgtaagacacgagataacggatcagtaccaaatgaaagcatagtaaccggtatgcatacatagagcataggctgcacgccaacgcctcgttgcttttcacgattcataacctccgtatgtatgtcgtaatttccaaatttatgaacaataattggatatgaaactttcatttcgtagaaatccatatcgttgatgacagtctcaaccggagacgttctggatatccgcattttatcaatcgtatcaatcatttggtcttgttcaatagctttaattttctcatatgtgttacgaatttcctgtttagctatcaaacccaaattaaaagcaaagaaaactatttctgctaattcataaggatatttttgctcccctttgtagttcacaaattcataatcggccaaattagttttcgctctattctctggctttgccaacaaatcataccctatttgccattcaacataacattcagtagttagttgttcttggcgagatgcaaccggcatgccatactctgcgaaaaacgatcttctctttatccgaattttacctgtaggttgcgtcataggcaattttactttcaaagatgtgtcattatgaattattttagcgggttcgcttgccatgttgctcctatgcggttaaatttgtaactgtatgtatatattttatcacactttttacatctacatcactaggaatatcagctatcccgaagatttccggatgattatatttggatacacgaactacagcatctgaaatcccatcaaagtctttctgtataaaaggaatatcaaaattacccatataatatggaggattggcataacgcttaaagcagtctacgtaacaatagtaatttaatttgtcaggatttacatcaacggcatttgctaatctctcctttataaatgtgcggctacgcttcagagcatttatatcccgtaatgtgtaaaacaggatttctttactataacgaattgaagtagggtatttctgtatataatcgcctaagtaatcccattgcccaacagaaaacgacactccctcgaccgtattaaagaccattccattaatgccagagtattctgtcccattgcccacattgcgctcatataatgccatgataactggaaagcaaacatgcttcgaagtattagcgaattcgctacttgggaatataattgattttagaattcggtagttactgaagaagctttttgcggatttgtaattggcttccttagttaaatacgaaagcgggtgaagaatgcatgcgtactcagccttgagtttgttatatgaattaagcgagcttagtccgagatctctggattttatatcttggtcaatatcaatctttttcttgtcttttattttcctgtttatttgtgaagtagtatcattataaggcggattcccaatgacaattaatggttctgtggcggttattccaaattcgcttctgtcgaccttgtatagtgcgtttttattgtagaagcggatgtctggatatagcgttgatgcattattaaccgccgtgctatcgatgtcattcccaataaatttattttttccgaatgcgtgttttagctgaaaaaacgcaccgtatccgcatgaggaatccaagaaggtatatgatgaattgactcccaactcttgtagccattgacttgctaaatttacatatttctccggggtataaaaacttccttgattaattatttgattcttgcttagatgagttggattgcttgagaccataccaaactaattataactcaaactcgtaaaaaacaaaatgttgcatgcctttgcgcttactgacattcctatcaatcgaaagaatggtagatatatgtggaaaagcccaaaaaagcgccgcagaatttggagattaaatttcaaatcctatgcgacgcttaatataatgtgcaattagtcggaaagagcaacctcaatctctgtgctgtctgtcaggcggaattggaaatgtagattaggatgaatcgtgaccgattccactaatttctgccaccgttcctcagtaaaggtcgtagcagttctaccgagttgggttaaaagctgctcaaaagcggctttaatctgactctcccgaaccactgggctttggcatcttttgtttttgctgtacttatggttgcagtaccagacatcatagcgtttggtattggcatagttatgccagaccttgtgcccataaaagccgccgcaatctgggcagagtattttgttcgagaatacgctattatcacggattttagcacgatacggggcttgtttagcaagtttttcctgcaccatatcgaaaacctccggctcaatgattgggtcatgggagttttccaccagatactgcgccattgtgccgtcgttcttgcgaacctccttggtgagatagtctaccgcgtaggtcttttggagtaaggcatcacccttgtatttctcgttggtgaggatgcttttcaccgtgcttacagaccacttcactttgccggaaggcgttgggatgccttggcgggtaaggtgctctgcgatatgacggatggtcttgccggacaggaacatggagtagatttggcgaacgatttccgcctcttcttccacgatctccgggcggccatcttcacctttgcggtagccgaggaaatgggaatatgccatggtaaccttgccgtcccgcatatttttctgcttgctccaacggatattttcgctgattgaccggctctcctcctgtgctagcgagctcatgatggtgagcatcacctcgcatttagggtcgaaagtatgtaggttttctttttcaaagatcacctccacaccggcggccttgagctcgcgaaccgtctggagcgtatccacggtgtttctggcaaaacgagaaatggatttggtgagaataaggtcaatctcaccgttcagggctttctgaatcatcagattaaagccatctcgcttcttcgtattagtgccagtgatgccctcatccgcaaatacggatacaaactcccagtctgggttgctctggatgtagcgggtataaaaatccacctgcgccgtatagctggactgctgctcgtcctgctccgtagagacacgggcataggcggcaacgcgcagcttatccggcacagcagtgctttccgcagctactttctgggaaattggttcaatgatcgtaactttgcgttctgtactcatttttcctcctttttgtgtcgggctaaagctctctgacgagctatctcccgcatttccggtgtccagccctcactacgagagcggtgctgccactgggtgtcaaccaccgtgccgtcccgcaggataaaccgcagttggtagtgtgcgggagcaatgatttgccgcacccgctccagcaggatatcccgatttaacgaagatacgcccaatacctccatcgttttttcaaccaaaatgtcctctggaattttctgtgccgggcagatgtccttgcccattgagtagtagctgggacacgcccatactgatttatcgtatttctttgcattggtgcgatagtgcttatagtggtgcccgcagagaccgcattgcaggatgccgcagaacaggtgtggttcgctttgggtggatttaggggtgtgatcgtatttcacggccctccgcgccatttctgcctgcacccgatcaaatgtctcctgatctatgatagcctcatggctgtgctccacaaagtatttccgtttttctccatgattgtttaaagtcttcttcgttctgaagtccttgcggtaggtcttttgcagaatcatgctgccggtatatttttcgttcatgaggatagcgcgtatagatgtccttgaccaagtgttgccgctggccggagagataccctgtaacttcaactttttagcgatgttggcttgtccaaggccggaaaggtaatccgagaaaatctgccggacaatttcagcttcctccggcacaacgaccaactggcaattttccagcctgtagccgagcattttaccaacccacggctcgccgttttcaaaccgcttgacgattcgccaacgctggttttcactggcagaccgggcttcctcctcggcgtacatggcgaggagcgtgaccagcagctcaccgtccgggctgatggagtgcatattctctttctcaaaataggtgtccacaccaagccgtttcagctcgcgaatcgtctccagcaggattactgtgttcctggcaaaccgggtcacggatttcgtaatcacaaggtcaattcttccgtcccggcagtcctgcagcatacgctgaaactccgggcggttgatagttgttccagaaatcccgttgtccgaataaatcccaataagctgccagtctggatggacagcaacatactgttcatagtattccgtctgcgcctccagtgaatggaacgcggcgtctttatcggatgaaacacgggcgtaggccgctacacgggcaatctgctgttctttgggttttgcgggtaattctgttatcttcatggatttttacctcctaacaccattcatcactctctttgcgagaacagtcaagactatttccggacgatttttcgattattgcgccgccactccgtccggcaggattcacagcagaaaacagcatcgctccgcatatctgctggcagcggtttccggcagtttttacacaaaaccgccgttgtcttctcccatttggtcttgcgcgaaccggatgccctaaagccctttcggcggcagatggatttcaccgtgttcggggaaagggtcagttcccgcccaataaagctgtacggataattccgctctctgagggcggcgatctgttctaattgttttgccgtcataaaatcaaacctcctttttagaaatccccagcccataacaggctggggatgataaggtacgcccactcaaattttgcggatatggtcttcgccataggcgacgccgaggccggaaccgcagtcccagcggacgaacaccgtgccgatgtcatccacaaatgagactgtcccccggtcaccgggcttcagcttggcataggggtcgctcatcgagatgagttccacccgtgtgcctttgggatacgccatccgcagacgttccaccgtttctctgcttggaaaaccgttcattcggatacctcctcccggcgttgccccggcgcaccgtttttccacgcactgttgccagagaggttcatcagaagaatcttccgggtctgcttgtacttcgggcctttcagcccaagctgtacgagaaacagccgcatggcgaacttgtcgttggcgccggtatagggtttcgcggtaatgcgccgccgctcccgcgccatcttgccgagggcgcagataaagcggctgtaagcctccgcctcgccgtccaggccgtgcagatggaaccacgggaagcagagcttgtccccctcgatttcaaaggagatgtgctcgttctggaacgccctgcggaacagcggcgctttgccgccgatgatctcccgcagccgatccagcgcctccggcgtgaacagattacacggcagagaaacggaaagcgcgtccccctcaacggatgccggggtaaagccctcctccttaagtttggcgatgatttggccgataatctcctgtgtggtcgaagccggacaggtgatcgcgccgtttttgtccacggtgtagttaccgaccttgtaggcgaagctgggcgctccggcgtagaccggctcccagagcaacattgccccgagcgccttcgccagccatttgcgctcgctgccggtgacgttataaacaatcgtcataacagttcacctcagctttcttcgccggtgaaaatgaaatgggtatactcccggcggtggtcttcgatgaagcacaccagttcgtagtagccctcgcggttggcgatgacctgtaccatgcgggtatccagcatattggtttcgccgctgtcgcggatggccatgatctgcttgcggatggtgtccgtcataatgcgttcctcctttttcgtcgcgtcggcgtagcgtttcagaacagcggggtcaaacccggcgctctgatagccctccagaatggtggcatagtagcccttgctgggggacgagagcggatgaccgtcgttcatgatgtagaccatcgcctggacggtctcgccgttcagttccaccggaatcgtttccttgcggtagaagctgggggcgccctcgtagacgtccagcgcctgttcgtcctggggcataatgcgccagatcaggacggggacgctgtcgttctcgctgggttcaatggtagcgacaccgttacccttcccccggaaggtcatcttccagccctccagatgggcggtgcccaccaccttcgccgtagggcagcggtgtttcatctgctccagattgagattggagccgtaagcgatgtagagttttccattttctttcaacatggtatgttcctcctcagttgtattctttcaacaggatcgcgtaggcggcttcggcttcgggcgtggcggggcgtttgtcccagccacggtcataattcgccgcaaactcgccgttttgcttcagtgagagcttgctgatccgtccgccgtcgatgccatagattttgctcggctcgtcataagccttgacccaatagtggattttggtatatttcccgtcttcactcgggacggcgatcactccttcatgccacatatacctgcctcctcactcatagtgaattgttccgaacagggcgtattggataatggcgtccgacgcttcataatcgatatcgcggatgtcgatttggccctgttcattgcgatctacattcccaccggcaatcagatattgacggaaaccgttcagcagtttctgcagcgtcaactcatgaactgtgttggcattgtcccgcagaagcagcgtcccgttccgagaaagctgttcactgatcagtttgccggggtactgcccctgtgctgtcacctctttgcaccagcggaggataccgtcgcagagcgccttgctcatgatttcgtcgatatcttcgccggacagggaaacaggcagttccaccgtgatctcatgccgcaccggctggtaatacacatattccagatcgacgtaagcactgtcaatgggtgggatgagggagagtttcagcagcagatgcttcagcccgcgcttccattttctaagattcatcggagcgcctcctcctgcttctgcaattctccttggagccgtaacgccaggcggcgttgccgtccagatgctcatagaggtgctggcggcaacttttgaactcgtcgccggagagcccgatgcggacgagatagactcgcatggcgaacttctcgttctcggactgtaccttgcggtagctggcgtacttctgcgtcagcgcctggtggttcatcgccagagcgaacacgatgtaggcccgtacctttccggcgtggagcgtgctgttaaagccgcgcagctccaccgtgtgattgccgtggaagaagctgtgcagattgagaaagtggtagcggctgtcgtggtagtgcgtatcgcgggttccacgatactggctgtaccaaacctgctccacctccgcgaacgtcctgggcttttcctcgttcagctttcgcaccatataggcgtccatcttcttgcagtaattcatccgatccgccggaatctggagagccttgtagaacaggtcgttgcgggaagcaacgaggttcacaaagttccacaggctccggggcgtatggttgtcgccgtccagatggacgtggatgccgcaggagtcgttagcaaaccctccggcctttttgagccgccggacaagcccttggagcgtagcgatatcctcacgataggtaaggacagggctgaccagctccacgctgtagctaccaccggcattgacggtccggctgccctgtttcttctggcagttgatactgccatcggacatgaacttccaaatgcgtccatccggggtggcgacctcataggtgccgtagtacccgccggccacccgtagcgatccgcccaggaacttcgcggcggtttccgccgtctgctcccgggtaatgccggtgaactcgatctcgatgccgaacttgctgctgaacattttacatactcgcctcctttttgttggcgcgtatgcacgctggctctgcgatatacgcagagttttgcgtacatcgcggccacgctgttgtggttttccttgcttgttaaggtgctgccgggagcctcccggcgagagcgcggcgaatgccgctgagtgtttatcctccttcctgtcgttagtgttggtattcgtggtaccccatacggggcagattggtttgtttttgaaccgggggcttggggtatgtaagcagagcaagatcgaaggtagagaaacggtaaaagcggtattgatgattttgcgcagctgcatcggcagattgtgatgggaaggatagtgaagccctcacatacgccgccgcgtcttggagaccagcattgcgctatgacctttcccagccatcagccctgtctgcttacatacgccaagcccccgacccattaacagagctccttggcgtcaataaactggcggagcattttctccagctcgtccggggtgatcacgaggaacatcttgggatgtccctgcaggttctcccggatacaggcttttaagttctctttgcgctggccgtccttcacgatccacaccaccagcgggaacatctcggtggccttctgttcaaggccggtgtagtagtagcggaggtatccgctgcatttttctaaaacctgcgtcatggactcgctgcccaagtccatctcaatgaaccaccgatcctcatagccgtcataattcgtgaccgcaaagaggtcgggcttcaagtaacgggtgcagttgtcgtcccggtacttccgccagcaggagggctccgcatccaccagctccagtgagaggtcgctgctgtcccggcagagacagataagctgaacggcacactcggcaatggcgagggtatggcgcaggaacatcgcggacggctcagagaaccgcttgcggggctgcgcgccggggtcgttcaggatgagcagccgctgacccgcctcggtgaggtgccagacctgtaccgtggagccgccgccgtagcctcccacccggcgctccaacggacggatcaggccgtggccgttaaggcgctggagcaggagattctgctgccgggtctgcgaggttttggtgctgcagttcgtgatatacagcctcccaatctgcgtagaggtgaggaaacggtatctgcggatggcctgcaggacggcatggtcacgggcggataaccgcgcctcgatttcctccaattgctggcgggtcagcttggtggccttggacttgaccgggcgagccgccgctgggtaggatgctatcccctgtaaggggatagagccacctccctttgtttcgggaacctccggcgtttccgccacttcctcgccgccgaactccgggcggagggatgggcgattggatgggctgggaacgggggtaaatagttgatttttgcttgctttatggtcttcgttcatgtaaaattctccataggttaaggtttctttctgcgcccgatgggggcgtccgtcactgccgggtccggctccggttcggagcgggacatcagacggatgagcgcggccacggtctcctcggcggggacgccgtagcgtctcatgctctccgccttgatctccgccgccatccggatgggcgggacgggcggcatggtctgtccgctgatccagccggtgcttctgccgccggactggaagctggtgtagatttgataacggggtagggtcataaagtccagcgggagcagttccggggcctgggccgccatatccttggcgtcgtcactgttcaatccgaagatgattttgttccggcagttggcgtcgatcccagccttgatgtccggcgggagctggccccggtactgatgcgccacggtgtaggccacacccagccctctggcctgtgccagcgcgtccgagaaggacgtgggcagggacagatagtcctgcagctcgtccacatagaccgagaccatatgccgcttctccggcgcgacgttggcccgtgagagggcgagcgtccaggttaggcccacgataaggctccccagcaaacgggccgactccgccccaatcaggccccggttcagggggactaaaacgatccgccgtttcaggaacaaatctgccaacgaaaatttcggttcagactggccgaggacattccgcaggccggggcgataggtgatctgccgcagcttgttcagcaccggcgcgatctccgtgcggcgctcggtgtccttcatgccttcgtaatgccgccagaacggttcgagggcgatggggtcttttacttggctgacgatgtttcgccggaagttctcatccgtgagcagctggggcagccacaagagattggagcctttgacacgcgccagtgtcagcagcgcaccgcccagcacatcggcggagcggatgccccaattctgggcaaacaactcctggaacaccgcgaggatggcgtccgccgtgagggacgggtctttgttgtacattaaggggttgaaacctacgggggtgggatcagaggggtcaatgaccaccacatcgtctttcctctcctccgggattcgttccaacaggtctgtcacgaggtcggccttggggtcgaggacgaggacgctacgtccggcgcggatatccgataaaatcaagtgctgcatggcggtgcttttgccgctgccggtaggcccgaggagaatcgtgtgttccagggcatctttaggggcgatactgagcagcttcggctcggcatccagcgtggtggcaaaacaccgattttctgacgtgtaccctggctccctgtaccacttgggcggcaggagcagcttggggtgcagccccggcgttcccggcagttcctcctccccggcggggagcagaagaaaacaggccagttcctttacggacagtctcagcggcatccgccacggcagagaggcggcattcagatgttccggctgttctttttccgcgcggatatgtaccccggcggattccagcgtccgcaaagcggagatgatattgtgcagccgggtgctggtgtgatcgccggagataccgacgcggatgacggtgtcataggtgtactgctccgccttttcccggacggctttccgctgttccggcgaggcgctgtggacgctgccaagcattgcctgaagccaggtggcgttggggtctggcagatttttaggggtggcgctgggagcgaaggccgcccccagcacgatttgcactacacattccgcgtcagacttcgcccctgtcatggcggcgagggcggcccggatcatggcggcggacacctcggtattgagggagagcaccggtttggagattttcaccttccgcgcttccgtgaccggctcccgctgggcaccctcggtgaactgggtattggcatgggccttgaatacctcctgcacccggctcacagaccacttgggcgttccaagcagataccgcatccggccggccttgcaccgggcctcccacaccaccggcccacgggacgtgagcgcggcgatgtgagtgaggatgtcccagagcgtttcggcctcgtatggccgctgaatagacacttctcgccagacgaactctttagtagtcatctctgtccctccgccatttccaggtgcgatagataatgacgatgatggcggcggttactccgataacaatcaaggggacgcggatacagatcagggtctcgatggcaattttgatggcgaacacgcagatacagaacacaataaccccttccacgagtcttccgaacaggctgcgatccgtgtcgcttttgtccttttcgccgctggattttttggacatacatcacacctcctccttggtctcatccgatttaccgatagactggtctgtggtttcgtcgttatgttcaaacgagtatttggggacagggtagccggggatgaagatgtccgcgcccgcaggctcgtaatggctggcctgcacttcgtttccccagcagtaccatttttcactgctggcaggacgtttccgacagaacagctccaagtacggccccggcgatatactttctattgcgctaatgaccgatctgggcttttcgctgtgtgcagttggataactgatcgtccagttgatttgcgtccggcatttcggcagcaatttgccccgcacggcaaacagacaggtctcgctggccgttctgaggtagttcccaacaccaagctttggtttaatccagtggaacatagtgatgtaacggaaaccccatgctttgattacctccagaccttcatcaacgttggagttggttacccaaagccagagatgggcgttttcgtccgccaaatctttgaccggcatgtttttgatgcgctccagggacatcaggtcatagtggccaagtgcgccgccataaccaccggtcgaggactgattacgagtccaggccggatcggccaagacacatttgaatttcggaatcgccgggatgttctccggcacccggcaaaccgccggggccgctctttcaatcttgtgtttctccatatatttgaaatcctttcaacaacattttttaattggcgtttccacggttataccatgagactcgaaaatccgcgccaatgaaaacggcgaaatctttacatttggtaaaggtacttgtgatgtggatatcgggtagccttaaaatgactcaaaaccggtttcgacgccaatcgtcaccgttctgcggccactccatctgtcggtagcgggggtcactctgcgggttgcgccgggtggtggtgtctgtgcggtggaggcgggcaatctcggccatctgtttttcggcctccagcgccaagaggttgatctgaaggctctgccgggcggcactccgcagagcggccacctttggactctccggctgctgcacgatctcgacagcctctttgaccggctctggcacgacctcggcggcctgttccttcttcttacgcattttctccttctcctgacggttctcaatggcagcgccgatgagaacgaagataatagcgatggcaaaaaagagaagcacacgtccgtcgcccattactgctcacctcccgtccaaacggcccgcatcgccagacgcgagtacgcctgaacgatgaacctgtagtcctcacgcccgctgggcgcgatctggctgaagtattcctcgctggccgcgagggcggcggtgttgctcatcacctgctgggtgagggcggtgtacaactgcatctggagggaggtatgctccgccagggccaagctggtctcagccagccgagaaacctgctggttcaactcctcatcctgatacacaggggcggcatacggggtcgcatacgggatggtctgcatttgatagttgctcatgggatattcctcctttataatgtttgcggaaaagcaaaaatgtgatatactgacagaggtaattccgctttgcctttctgctgattccagtatatctgagggcctcccagcgcgatattgagaatgtgttgcgcagtgttgcgaaaatgttgcgaagaaaataagcccacccgcagcgaaggcggataggcttagaattctaaaggagggcgtataatgagtaagataccgttttgcttccccgtagtttatttgggattaattgacaagcgcatcagaaaaagtcaaaaagatgctataaacatcctttttaatggaagctgtaaagaagatgcctcatgggaaataataaaccgcgaggcagcaaataagtatattcaaggtggcgaaggaatcccggcagatcgtgctgatcagatatttgaactatctgagacagaactggcggggcgagctgaactgctcgaaatcagaaatcccgagatgtgcgtgttgacgttccatgcattcctttgtgagcgagtagaagtcagtgaagagataattcgaaaattagaaactattatacaacagtctactgacccaactttttacatcgcagccgtctttcgggaatctctgaaagtcaacgggcccacaagaaaatacctttcaaacgagctaaaggaagaactaaagacgctacacacagctcctggcgcactacaacgtgccaacaaactaaagttaaagctgcaagatagaacgtggggtgataacagtagcgataagctgggccacccccaaaggcgaacttatacaatggcggaaatcgcaagtggtattctggatgagagagccgctgtctttaattctatttttgatgaaacggttgacgaaagaaaatttgtaagtgcctgcgaatcatcggcgcttggcagcggacagcaagttagttggcagaatggctcaattgaagttcaggatggagaaacatatacgatacggatatatgtacacaacgataatctcaatggctatcgctcagtagcggaaaaaacaagggtgaaatatgtaattccaaccgagatatccaacgaacaggagattcgcggatatattacttcctctaacgcgttgccgtctgaatattggtcttccataattctaaaaagcgatacaaacgtgttttccctgcattatgttgcgggttcatttatgttacacaacgcagcaaccggttcacgggggtgtcaactgaagggctttcgaaatgacagttatacaatgatcggctacaagtatctggacggtgaatatccgggcgggaaccagtatgccagctatatcagtatccaagtgcgcgttgttttcgaggcgcaatgtaggataaaaacaacacagcgtatcatagaaagtccagacggatggtggtataggacaactgaggcagagattggcgatctggttgaatgccagttttactatttgaataccagtgacgctctacaggaaaatctgatggtgcgctatgttttgccggataatctggagtatattcccggctcgacagtattgtataactcaaatttccaaaagggtgtcgggcttaaagacgatacgataacaacgtccgggatcaatataggacactataaaccgcagggcaacgcctatgttcgctttacggtcagagtgatagacaagagcctatcttccggcttgaattgcttaataaattggggagcagcgaccgtagaaggtaaagtcgcaaaagataatgcacaattgtatataacaaaagaataactttatactgatgttttatatctggatcgttacaagcagcactacttattgcataggttgagagtaaagtatatttcttccaaaagccaaaatgccgcggagagcccgcggcatttggtgatttaatagtcatagatgttttggtcgagatactgtctgccgtcaatcaggatgatggacgattctgagtaacgccgctctttgatgccgcgacattcgttaaatgtcgcgatgagccggttgccgttttcgtcaaagccgtatttgtctctgccacgaaaatcgaactcatgcgtcgtcggatgttcgccgccttccacccacacgaggggctctccggagaaatctcggaagcggacactgcagcactcgtatcggtcgtcccatttcggtttcttcaggtcggcgaagtccagcgacaggataccgtcgcagatggctacgcgcatcagtttgaaacggtcggaatggccttcacacgcattctcgagatatccaaggttcattaactgctccggaagcgggatcgttgtgtccagctccgaaaggccatatgcgttgagacagcactttaccggaggcgcagcgaccgaatccttgaagaactcgtcgccgctgactgacttccaatgattggcgataacgtatcttctgcactcaaacttcctattaaaaaacaccatctttttatcccccttaaaatataagattattgcggtatcgcacgtcctgatgagcagaacgggcgaattccgcaataatcttggggataaatatatcaatgtgctaatcgttagattatactaatcattatagcacatttgttaaaaaatgtcaataatgctatgcttttttgagaattacggctatattgacctgcctcgtgctaaatcttcggtagtgcggagcaggctatcaacgcatcggcctccccgcctaatgtcgcagtgcgtatcctcgccccatctgcggatgatcccgacacatttatggatatacgcctcgacccgcttactgcccgcctctggcgctggtacgccaatcggcatccaggtaatctccagccttggatacgccgcctccataattttgtagagcagcccctggttgttgaggtctgcacagattgtgcagaagacttccttatgctgggttataaagatgaggatggcataaaaaatacggccatttggattggccgtggtgcgggagaggagccggagccggtcatccagcccggataaaaactcctctaccagcgcctcctcattgttgatgattgcttggttgatattaggatggtggttatagattgtctgccgggacagccccgccgcttttgccacctgccacgccgtgatcctcccgcgatgtcgtttcagtagcttcagaattgcgctttgcatcgcacgttcgctgtgctcataccggcggttgtgcggattttttcgactatgtttttcgatgcccatcatatttataataacacggcgggagaaaaaagcataaaaagtccgcaaaaatccttgcaaaatgcttttgtgtggtataattaaagtgcaataattaaatatttacaagtcaagatataaccgttttttagcggatcgaacaatatgaaaatggcactatgaggcgtcaaatacgtattgttcggttatatatcgacgtaaatatttgattattgcaccctcgtggtgccatttttgttatggcacctcggactaataacaagagaggtaataagcagaggtaaaaaatgaaggccatacaaacagcaaacaaagggggaaattcaaggttcagcttgaagaacaacaattatattaagctactgagtaatattaacagaacggggttattctccgcatttacatttattttgctcgctcttacgtgcctttttccaataagtaagggcgagcagagcacagaagccgtcaccggcaccgctcaaagttcatctctcactttgagcgtgactggtgacacagcttctgtggaactagatgttaattctacggacggcaccttcgcctcctcttcggtagccaactctgcttctttctccgtcgtaacaaacaacttctctggttacaccctctccatctccggtagcgataatgacggaaaactttacgatacaacaaaacaatatttcctcgagcctttaacttccgcagtctccgaagcggatttctcttcaacctcaagcctaaatggtaaatggggctacaaaccaagcaaatttaactcggctgtaaataacaactatctcccagccccaactactacggcctcaaccttggataaaacaagtgctgctaacactacagcaaacgactatactatctccctcggtcttcgtgcagattacggaacagcagcaaacacctacactaacgctttcgtaattaccgccgtcccgaacccaatcgcctatgttatcacttacgatgcaaacacaacggacacggtttctaatatgcctgccgcacaaaatagcaccacttcggccacttctatcacgctctccgacaaaaccccggcaagagaaggttatgatttcaaaggctggtgtaccgttgccccgacagaagcagccccggatacttgcactggtctcactttccaacccggagctgtctacggtatagaccagaccgtagagaatattactacgctttatgcgatgtgggacatcttggtctctggctacatccaagattatacctacagtcaatgctctacagatgcggtaaaccgcccagtacgacttctggataaacgagacaacaaaacttatactgtccgttatattaatggcctctgtaccatgacccagaatctcgcggtagataaagggcaagcgatgaccccggaagacaccaatattaattccaactatacgatgacctcagctgatttagaggctggcgataattcctataccgtagcagaaatccacgaaggcgacgctaccaatggtaattggtataactattgtgctgctacggctggtgaaatttgccaagattcaactacaatcgaagctactcaggatatttgtcctaaaggttggcgtctcccaactgggcagaacggtggggaacaaaccctcttaacaaacggtaaatggcagacctacgacacgacttaccaagcactctttaaccctgttgcctctggtttctacaacaatggtgccctcggcacttccggctctgaagggcgttggtggttgtccactgcacttagcagtactgatcgctatgttctcgattatactgctggatggggtctatactcgggcgatggttttagacgtagttttggtctctcaatacgttgtgtgaaagcgaagccgggagtaacgattagcttcaacactaatggcggcactggaactatggatatgcaaaaaattgatgcgggacaaagtgcaaaccttacggccaacaccttcacccgaactgattatgtctttaccggctggaataccgaaccagacggctctggcacttcctacgctaacgccgtcacctataccgccccagcctccgaagataataaaatcgtagtgctctatgcgcagtggaaaggggcaacgatgcaaacttataccgccgcacaatgccaagctgacgcttcctcgcaagccgtaacaattaaagactcacgtgacaataaatcctacaaaattcgttatattaatgatgtttgtaccatgatcgataatcttgattttgccttaacgactggtatgacgcttacgccagatacgacaaatgtgacaacaaaccgcacttttgaaacagttgggtcactaacgacgaatgacaatagtggttcgtatagccaagtgcggacggcaagaactggaacaattggttacggaacgcattacaattatgctgccgctactgctggaactataattggaacctcagataatactgatgcaactgaagatatctgccctaaaggttggaagctcccagatggtcacaatgctggcaccagtggcgctactactcttgaccaatatcatctcgccaataataaatggcatacttgggacgatacctatacggtagcctttaacgccgttgctgctaaagtctatagcgatggcacccttgtcacatctaatgggaattggtggtcttctaccgcaaacggtgcgaccagccggtactatctccgctatagttctagtggtctatactcaggtcttggcgatggcaatcgctactacggactctctgtgcgttgcgtgcttaagtagcgtttcgcttctgcttatcccttccaaggtcttgccacctctgcaatccgcccgacctacgggaagaacccgcatcctacagcaacttcacccctaaatacgcttggtcgagatcatcctgtgctacaccgagataccgttttgtcacttcgtaattgctgtgattataaatatccataatcaccaccggcgaaaccttgccgctgttccaagcgtgatagccccaagtcttgcggaggctgtggcaggagatgtggccggtcgcgcctacggcagcggcggcatcacggacaatccgccaagcctgggtacgggtgatcgggcggtctgtactgttgcggctggcgaaaatgtagctgcccttccggtatgggaagtaaatgcggagggcctctatcgcctgttcgtttaaggcaatctccttgtgtttgccggttttctgctctgtgagcgagatatgggtgcgaaaccgctgccgctcttcgctatacacatcctcccagcggagttccagaagatcaccgatacggagtgcggtatagacgccaagaacaataagcgcatggttacgaaactctccacggctgcggaaatactccgctaggtcgtggagttcttgtttgttacggataggttcggttgttgccataatattttaggctcctttctctatgattcctccggtatgaggataatcatataaaggagcctgcgcaattttttgaggatattgttacttattatagcatagagcctcgactttttcaacccgcttgcccctgtttttgcagtgctttgcggcaaatttcacaactgccgctgcccatcccgccaacgataccgacaaattgttgctgcaaacgtaacataatcctcaaagtgttacgttggggcaaaatactgcttttgcggggggattcttgtggaaaagcgaattgtatctatgttgcttgcattatgcctgtgcataacatttttatctgcttgcggcggaggctccactacgcagacatcaacagccgattcttcgcaaccggaaatttctagtaatgggccggatggaagcggatatgaggcatcaaataacgatgaaatagatgaacccgatagcttagacacttcgttcgctggagccgatgttggagtcacagttgacagtttaggtgcgtatacgatcgggattcaatcagatggaacggttatcgtatcaggcgatgatcagtttggagcctgcaagcaggaagatgtggatgattggtgtgatatcgtttcagtagctgcaagcaaaagttatgcagttgggttgaagtcagatggtacagtgatggcaacacattatcgttactttaatcccgaaaaatggcataacatagtaggaatcgatgctggcctgaaccatgctgttggggtcagagatgacggaacagtagtcgtgggtgggagtcaagaatatactgaggaattgtttaatgtagatgcttggactgacattattgctgtttcagcaggtactgttcacacagtgggcctaaaatccgatggaacggttgtcgccgcgctaatgaatggcatcagtgatgacggccagtgtaatgtggacgattggactgacattgttgcgatttcaacaggaaatcttcatacggtcgggttaaaatccgatgggacggtagttgcgacgggcatagatgcatacggtatgtgcgatgtagatagttggacagatattgtcgcaatatcagcgggaaccaatcacacggtaggcttaaaatcagacgggacagtggtagcggtcggctatctgggaatgaaagacggatatagtataaaagcagaggatgctttcgcccattggacagatattgttgcggtttcagcgggggatgctcatacagtcggcttaaaatccgatggaacagtagtgacaacagacagcttcaatggcgatgtatcggggtggcatgatattaaaatgccgaataaataaacgaattcacattgatatctttaacggctccagtattttggagcaaacacgagtagattgataaaggtgttgaaagaaagacttaaaataatatgcaagaaaaagggggattgaacatgaaaaagcgaattatttcattgttattagcagtatgcctatgcgctacgctgctgccgaccacagctcgggcggcggagcccgtggcggtaggtcccatccccgaggtttacaaacccaatgtgatttacggcaaagagcccgtggtcttttggacacacacttggcatgcccgggcggcgttaaaaagcgatcattccctttgggcatggggaagcaattatgacgggtctgtaggcaacgggaacgggttttatacctattacgatcccaaacaaaatagggagatcagtgcttttgtggataccccctatcagacattggatcatgtaaagacctacgagggcggtacctgggccatcaaagaggatggctccctctgggtctggggggagacggcggtccgcttgggattgagcgacaatgcgtccacatctgcaccacaaaaatatatggacgatgttctctccttcagctatggatggtcaccatcgaaaccatacgaatcatacgaagagaatctgaaacgagcctttccggagtacaatatgtatgtagtcaaaacggacggaagcctttgggcctggggcaaaaacagatacggtgagttaggggatggcactacgcaggagcgggccacgccggtcaagatcatggacggtgcgcgctatgtactgtatgcccagggagatgggccggggggaactccttatccgggatatggacacgtttttgtcatcaaggaggatgacagcctctgggggtggggagctgatgcggtgctcatggataacgcgcgcttcaatgatggcgttctcaccacaacacccgagaaacacctagaccatgtaaatagcatttgcagcggcgatgggactgtagcggccatcaccccaaacggaagcctttatctctggggcacgctccccggtccgatggaaggcgctataagtcactgggcgttcaatacgaaccatttcagagatttcaaccttgtggcggagaatgttcgggaagtccatgtctatggactcctcagaattgtttatgtgaccacctcagacgaggtgtatatctggggcaatgaccacaacggtgaccacaaaacgcccacgaagctcatggacggggtgtccaccgtggcaggtgattatgatacgctgtatctatgtaagaccaacggagacttgctgcgctatgacggtcaaatttacgatgagacaacgggcaccacgggcgatcctgccccgataaaagtattcgacggcgtggtggggatctatggcgagggcagtacttattttgcggtgaaggcagacgggagtctttggggatacggaagcgaccttgaacacttgctaatgggcaaggcgggaggcaaatgggccaacgacaaattcatccacctgatggacggcgttaagttgccctatactgcccggcccgtccagccgactactccagttgagccgaccgttgagccatttgcagatgtgaaagtcagcgcctactatgccgagcctgtaaagtgggctgtggaccatggcgtgaccgtaggcacgtccgccaccacattctccccggacgccacctgcaccaatgcgcagattctgacctttatctggcgggctgccgggtctcctacccccagccttgccaacccatttataaatctgtccggcagcgagtattacgctaaagccgctgtgtgggcgtattcaatgggcatggtttctggcaccgtatttgacgccaataaagcctgcacccgcgccatgacgatggaatacctgtggaaacaggcaggaagccccgccgtggctgccaacgggaagtttactgatgtcccctccagcgcagcctatgccacagcggtagcctgggcggtagacaacggcatcaccgtgggaacttctgacacaactttctccccggacagcatttgtacccgtgggcagattatgacgttcctataccgggcagagggttgattataaaaattctttaaaataacactgtttctgcgcctgcaccagaaaaataaaaaactggtgcaggcgcaccaatttttctcaaagtttattttccatctcaaatgccgccaaatttctggtgcatccgcgttgctgaaatcctcatcgcaaccacaaaactggtgcaaaaaataaggaagacccccgttatacgggggtcttcctcacgacatcacattctccacagtgacgtcctaatatggtccgagtggggagactcgaactcccggcatcttgctcccaaagcaagcgcgctaccaactgcgctacacccggataatttgattttcctgtatggagtcggtgctctgcagataaagactgcttctgtttcatagtataatataaacgagaaaagattgcaagtattcttttcttatgttaagataggggacgacttccgacatgaggtgactgagctgtgagaatgagaaaaaagcccaatctgatcccacggatggaccgatgccgggaccggatgatcccagatccggtggagctgcggggacactggcgggacctgatgccccaggcgcgggaactgcgggtagagctgggatgcgggaagggacgctttaccgcagagaccgcagggctggagccggatgtcctgttcgtggcggtggagcgggtgccggatgccatgatcgtggcgatggagcgggtggtggagaaagggctgtccaatgtcttttttgtggacggggatgcggctcgcctgcgggactatttttctccgggggaggccgaccggatctacatcaatttctgcgacccatggccctccaacaagcacgcccggcggcggctcacccacgagaacttcttggtgctgtaccggggggtcctgcgggacgggggacagatccacttcaagacggacaaccgggagctgtttgagtactccctgttccaattccccaaagcgggctatgagctgtctgaggtgacccgggacctgcatgggaacggggtctgcgggattatgacggattatgaggagaagttccatgatttggggacgcccatcaaccgctgcgtggggaccaaactgcacctggagcaggagccgaagtttcggcccatcgccgggccccgggatctggcgccgcaggacggcggcaaggtgctggcggaggaccgataaagaaagagcagtaccgcggcggccttttccgccgcggtactgttttctgatagaccgctgtatgtccggccttactgcccctgatagagcggatatttcccggtcagctccttgacttgggcccgcaggctgtcgatcttgtcctcaaaatcggcctgggcggcctgacagatcagccggcccacggtccgcatctcttcctcccggaagccgcgggaggtaacggcgggggtgcccacccggatgccggaggtgacgaagggcttttccgggtcgttggggatggcgtttttattgacagtgatatatacctcatccagacggtgctccatctccttgccggtgagatgggcagggcgcaggtctaccagcatcaggtggttgtccgtgccgccggagaccaggtccaggccgccctccataatggactctgccaggacggcagcgtttttgacgatctgctgctgataggccttaaattccggccggagtgcttcgcccagcgccaccgccttggcggcgatgatgtgctccagggggccgccctgggagccggggaagatggcggagttcagctttttggcgatctccggatcgttgcacagcaacatgccgcccctgggtccgcggagggtcttgtgggtggtggtggagaccacgtcagcgtaggggataggggatggatggagcccggcggccaccaggccggcgatgtgagccatgtccacgaacaggtaggcccccacctcgtgggcgatctccgcgaagcactggaagtcaatgatacggggataagcggaggcaccggcgatgatcattttggggcggtgacgtctggccagatctcgaacctggtcatagtcgatgcggtgggttacggggtctacgccgtaggccaccattttgtactgcttcccggagaagttgacgggggagccgtgggtcaggtggccgccattgtccaggctcatgcccaagacggtgtcgccatactggcagagggcttggtagacagcgtagtttgcctgtgcgccggaatggggctgtacattggcaaagccggcgccgaagagctgcctggcccgctggatggcgatgtcctccactacatctacgcactggcagccgccgtaataccgttttccggggtagccctccgcgtatttgttggtgagcaccgtaccggcagcggccagaacggcggagctgaccacgttctccgaggcgatgagttcgatgttctgctgctggcggtcatattccgcctgaattgccctgccgacctcggggtcggcggcggtgatgaaatccatggcttcctggaccaatgggaacactcctttgtcagttgatgcccggcggggccggggccgtcttccctattatagcagatggggcggaaattacaatgaaaatagggaagaaagggagagcttgctttacaaggaccggggtgctggtgtaagatatgggggaagaagccccgatgtaaagaccagcaggggagaggccgtcctgacctttggcccctctgactgggagcgggagtgaggggcgcaggccccggatatgacaggacaggcctcgcctaaagggcggagcggtccgaaaggtgtgagacaggatgaaaaccatagaagagatctggagcattgtcaatgggctgaaggagctctacccggatggggtctgctctctggattacagaaaggactatgagctgctgttctcggtgcgtctggcggctcagtgcaccgatgagcgggtgaacaaggtgacaccggccctctatgcccgcttccctaccctggaggcgctggcggaggcggacatcgcggaggtggagaggtacatccactccaccggctttttccgggccaaggcgaaggacatcgtgctggcctcccagatgcttctgcgggactacggagggcgggtgccggacaccatggaggagctgctgaagctgcccggggtgggccggaagacggccaacctgatcctgggggacgtgtaccacaccccgggggtggtggtggcggatactcactgcatccgcatttccggccttctgggcctgaccgacggcaccaaggacccgggaaaggtggagcagcagctgcgggccatcctgccgccggaggagtccaacgacttctgccaccggctggtcctccacgggcgtgctgtgtgcatcgcacgccgtccccagtgccagagttgcgtcctgcggccctggtgtgaccacttcgcaaagagcgggcagacagcccgggggacagaagggagagagccagcatgattggatacggcggattcggcatggccaacgccatgttcaccattgtccccatttttatcggggttgtcttcgtgctgatcctggcgggcattgcagtccaagcggtccgtggggccgcccagtggaagcggaacaacgacgccccggtgctgacagtggaggcggaggtggcggccaagcgcatggacgtgcgcacctaccgccacggggggactgagcacagcaggagacatgcctccagccggacctattactacgccacttttcaggtggagagcggggaccggatggagctggaagtgcccgacatggagtacggccttctggtggagggggaccgggggcggctgaccttccagggcacccgctttcaggggttccgccgcacatgagtggagagaccgaatgaggggagaagcggaccagtggaaaaagtgaatcgctggatcttttatattctggggatggtggtcctggcggcggggatcaccctgaacacaaagacggggctgggggtatctcccatcatctcagtggcctactgtgtgtcccagatctttgagctgaatttcggcgacatgacctttgtgctctacgggatctttgtggtggtgcagctgtttctccgggagcggcgggagcggctggccacactgctgcaatttcccctgagcctggtgttcagccggctgctgaatctgtgcagcgcctgcatcccctatcaggcggcggcccacagcctgccggaaaatctggcggtgctggccctggccatcgtgctgacgggggtgggggtggccctcaccgtcaacatgcggctggtccccaacccgggggacggcatcgtccaggcggtggcccagaggatgggctgggatcagggctttgccaagaacgtgtttgatttgggctgcgtggcagcaacggtgtgcctgggcctgctgctgaccgggcggatcgtggggatcggcctgggcactctgctggccatggtgggggttgggcgggtgatcgccctggtaaaccattggaccaaagcgggcatgtgccggctggccggcgtagcataaacgggaggacaagaaatgagcggaaaaggatcagaggcccggctgacccacggcggggacccgcgcttccgggagctggtccgggcgatggaccgggagtatggggagcggtttggggcagcggccctgaagtgccggagctgccacggcctggatgacatccggcaggcctgcctgctcctgcgggacgggcaggtggtggcctgcggcgccttccgggcgatggaggagggcacagcggaactgaatcgggtctatgtccgtccagaacaccgccgccgggggtgtgccaggcaggtggtggaggtgttggagctccaggccctgtttcagggctttggccgcatggtgatggagataggccgggatattccggaagcgatatccctttacagaaaaatgggataccgggagatcgagactctcaccatctttgcggacaacaaggacaccctgtgcatggaaaaggagctgctgtgagcggcgggtccaggggcgggcgcccctggagggaaagggagtgttggaatggcttaccggccattggcagatgagatacggccccagaccctggatgaagtggtggggcagaagcatattttaggcagggagggcctgctccgccggatcatcgaggggggtgacatccccaacctgatcttttacggtccctcgggtaccggaaagaccacggtggccaacatcatcgcccggcggaccaaccggcccctgcaccggctgaacgccactaccgcgtccatcagtgacatcaaagagatcatcgcagacatcgggaccctgatggccccggaaggagttctcctttacctggatgagatccagtatttcaacaagaagcagcagcagtccctgctggagttcatggagaacggcaaaatcaccctcattgcctccaccacggagaacccctttttctacgtgttcggggcagtgctctcccggtccaccgtgttcgagttcaagcccatcaccgcggaggacgccctgcccgccatcgaccgaggggtgtccatcctggaggggcgcctggggggcggattggtgctggaggagggggtgcgggagcacattgctgcctcctgcggcggtgacatccgaaaggccatgaacgccctggagctgctggcctcggcggcgaaaagggagcaaggaaaattccttgtcactttgtcggacgcccagacggcggcccagaagtccgctatgcggtatgatcgggagggggacaatcactttgatattgcctccgccctgatgaaatctatgcgaggttcagacccggatgcggcggtccattatctggcccggctgctggaggcgggggacctgatcacggccatccgccgcatcctctgctctgccagtgaggacatcggcctggcctatccccaggcggtgcccatcgtaaaggcctgcgtggacagcgcccttcagctggggctgcctgaggcaaggctgccgctggcccaggcggccatccttctggcaaccgctcccaagtccaacacggcctgcatggccattgacgcggctatggccgacgtgaaggcaggactggcgggggacatcccacgggagctccagaatgtccatgccgactcggcggggatggagcgggagcagggctacctctacccccataacttcccgggccactgggtgcggcagcagtacctgcccaatgagctgaaagacagaaaatattatcagtacggggacaacaagacagagcaggccgcccggcgctactgggaggagatcaagaaataggagaccgcccccagcgggcgctgttgaggccaaaggccccgcgggcggatagcatccgcccgcggggcctttactggaaaggcaggacctttgtctgccgggagagtcagcggtctgtcaccaccagggtctggatctcgttggagccggagcccccgctgaggacatacagggtgtaggtggacctgggcgccgcctccagctggagggaggccaaggcagagaaggggggcgccatcccgatgaaggcggagtccatggtttcgatgtccaggtagctgggcatggggagaaggttggtctccgccagatagaactggtaggtcccggggcggatctgcttgaaataggtggtctccttgaattgcacgtcggtatagaccacccggccgtcggcaagaaggaggtccaggggctggctgttgtaggccaggttgctcatccggaagttggacagagcgccggtgggggggcagcacacatcggagatggggaccaggtccaggccgccggcggtctggaccactgctacggtgacaggggcgttgtcctggaagggcagggtcttttgcaggtagatgtagccgtcctggcccgacacggtgacggaccggtatccggaagccatccggcggtaagaggagactgcggtgaactccagagagcgaaccgccagcgtgctgccgatgaagatgcggaaggggggataggagcgggccgcgttgagaaagcggatgctgctccaacggggccagccggggaccatgccgatgtcgcctcctggggccacgggaccgccctctcccggatttgggagagggatcaccggagtacccccgatgtcgggcgccacaggaccgccctctccggggtcaggcagggggatcacaggggtctggccgctggaggcacgggactgggcggcgtcgggggagaagggttcggaagagaagcagtggaaggattccatatgaagagccgaacaagctcggctttcctcctttcggtttgggctgccctatcctattccggggacgggagaggggtgacaggcgtgaccgcaccctttttccgggaaaggggaggggaagctggccgaaaggagcacaggccggacctggagggaaaggataccaggagaggcgctgaaaagcggaaaccggcggctgcctatgggcagccgccggtttttcacatcgcggggtcggaggactggcgctgatcccggtcccggcactgcgtgccctgggcctgggcgcccttgctgttcttcttctgccgggcctgcttttggtcctgctggctgttcttaggcataaaatctcacctcagcagtagtattgcctgggaaaagagatccataccagaaaaacagccgaactgcaaaaaaaactcagaaggacttccggtacagctcgtagccgatctctttcaggtagtcggggacgttgcggacggacatccggatgaactccttggtggactcatccagctcctgatagggccgcatgtctgggtggagtttcagctcgctgtcccgcttgccgtagcgccagccgtcagcccgcttgtccttcatccagcgctcgtgctccagctcagagagctgttccaacactgggccgtagagatccatgatggtgtccgcggccccgggaaggacggggcgcaggccgatgctcatgttgaaagactccagccgctcccccagatagcggatctgggagcggtggccctccttgtagaactcgtccaggtcgctccagtccgccatctccggttcctgccgcaccagggagagctccttgggggtggcaccccgggcctgggcgtcggccaggtgcttctggcggtacttctcgtgggcagtgaaggcgtactgttccaccgcctcccccatcatctgctcaaaggacagcttgcgcataaagtcctggacatccacatggatgtccagctgggcagccaggggaaggcaggagggggtgtaccggcttgcgccagccagccggctcatacccaggataaattcaatggaccgggccccatggcggtactccgacaccctcagcagagcgcacagcaggccccgggagatgtccacccgtccagtatccgggtggcagatacccttcacgtttttcaggatcaggctgcgcagcagcatagcacggcggatgatgtgctttttgtcggtaacgcaggtggggttggggcccttgatgtccaggatgcctttgaggcggctgacgaaatcggggcccttgatggcctggaagcggtgcacgtcctccggggcctggggaagaaattccgagaaggaggaggcggtggcacccgcaaagacaaagaccgcccccgggatgggcagggggctgccgtccagggtgtattccccgtcctgcatgggggccaggaaatacttcagccagccccgggagaccccgcccagctcggagtcaaactcgtcgaagaagatcagggggatcagcccgtcttcatagcgcagagcctgatggagggcgtggaagagctgggggaccgagtcgtactgggacaggttcagggaggtgatgcggaacctgccccggctcagggcgatctgcttgacgccgaaggacttgccggagccaggaggtccgaagacggcgatggagattggcttgggggcgtcctcccctgcgtcccggtggtcatatgcatagatgtactcgtccagcagggtcttgatggcgtggtagttctcgatctcccccaggtctaccgtagacagaacccggtagcggcagacggggacatggcggaacaggtggtccgtcccctccagcacgatgttctgggccactgccagatagcccccgggctgagatttgcagaactcgtccaggatgcagaaggggtcggaaccggagaccagggtcttcaggctccggtcgggcaccgccacccggcagacctcaccgtcctgccggcgctgagccaggctgcacaggacctgatagaggtcggaggagtcacccagggtccgcttctcgctgcggttgggggtgaagagcagggaccagtgccaatcctcccggatgagggcgccctcctcgttgaggaggatcaccatgtccttccggctgcgcagggcccgcagggcatcatttaccgccagctggaggaggaattcatccacggtgcgctcgtaggagatctcccggctgatgggaaagtccagctggcgcaggtgctccatgcggagcaggggcgtcttggagggggagaaggcctgggccagcagcaggccggactgatagggctgatagtaggctctgggtttcatggcgggctcctttctgagcgggccggaccgggacccggcggcaggtgtcttttttctattgtagacgctttttccggccttggcaagagctggggatgggagatgaaaagagaaaaatgtcatacaaagaacaataattgtcatacaaaagaaagaaatccttgacgtatagggtatcgggttgtagaataaaaacaatgacatgcccaaaagacaggcggaggtgaggcatatggaacccatttccagggtccccattgtccagcaggtagaggagaggatcagagagctgatccaggaggagcagtatcagcctgggaaaaagctgccgccggagatggagctgtgccagcgcctgggagtgggccgtggcactgtgcgggaggcattccggctgctccaggccaagggtgtggtggagatcaagccgggacggggagcctttgtggcggagaaccctgcagagcgggatatcggggccatcgactggctggtggagaacgagcgggagctgcgggactccatcgagatccgcacggcgctggagcctatggcggcccggcggatggcggagcggtgcaacaccgaggatatccgccgcctggagaacatccaccgcagcttcctaagtgccattcaggagggggacgcggctatgatcggccgcctggacgagcagttccacagcgccattgtggagagcagcgggaacgcactgatgatcgagatcaacagccatgtgtgccagggaatgcagaccttccgcagcaagaccttccaggtggagcagaacgtgaagaacgcggtcatgccccacagcaatattatgaacgccatcctggcccgggatgccgcccaggcggagcgggagatgcgggcccatctggacaaggtccaggaggatctgacccagaacatccatgccccgggacacgagacaaaataatcggaactgcccagcccggcagtttgagacccccagccgtaccggtgcggctgggggatttcttctgtgtcccggcagagaagaggacacggtccggctcaggcagcggtgttttggacgtgccaggaagacgggcggggtccaggggaaaaccggctttgtacaatatgttgagaaatttgagaaaaagagagagcagagcggaaattagcacaaaaatgagagaggaattttgtcggctttttccattgacatcttaatacagtcttaatatactatagtcagatgtcatacaatcgtccgtctgacgaaagggaggacggtggtatgtagcttcggacacaacgataaggaggatcctgtaatgaaaaaacttgcttcccttgtgctggccggcgccatggccttttccctggctgcctgcggaaacaacagcactccagccggcggcagctccgccaatgccggcaccagcactccagccgccagcactcccgcctccggcggcatcgagcccattgagctgaccatctattcccccggcaacgagaactccgtccccactaagaccatcattgagtacgcccgtctggtgaacgaggcctctgacggcgccatcaccctggatgtccaccactccaacgagctgggcagcgacgccgaatctatcgagtccacccgcatgggcaccatcgacctgatctttgccggcacctccggttttacctccttctatgagaaagccaaggtgctggacctgcccttcctgtttgacagcgcggagcaggcttatgaggtgaccaacagcgagatcggtgagcagatcttctccggcctcgaggagttcggcctggtcttcctgtccgagggcgataacggcatgcgccacatctccaccaccaaccggcccgtccacaccgccgccgacgtgcagggcctgaagatccgcgtgcctgagagccagctgtacctggacgtgtggcaggctctgggcgccacccccgtggccctggctctgcctgagctggccctggccctgtccaatggcaccgccgaggcccaggataatgccacctatcacctggtcgccaacgccacttatgacgacatcaaatacttctccaacatcaactacatgtggatgggctgcaccatggccgccaacgccaacacctggaacggcctggaccccgccgtacaggagatcctgaaggaacaggccaaggcagctgccaagtacagctttgacaccatcgccgccgacaacgagaccgccaccaagactctgcaggacgccggcgtggagttcgacttcgagcctgatgtccagtccttcaaggacgcgctgggcggcgacgcctactatgatcagtataaggatgagagctggtacgaccaggagctgctggacgccatcctggcggaggtgcgctgatccaaacaaaatctgcgctgacagctgcataggcccctgcctatgcagctgtcctttgtagaggggagaaatcgtatgaaattgtgtaacaagatatccaaaggggtggccaagggcgcggaagtgatctgcatgctcaccattgcggccctggtgctggtcatcgtggtggagctgctccgccgtaacttcctgggccagtcctttggcgggaacgtgcagctgtgcggcatcctcttcctgtggatggcctttatcggcctgatccccctgtaccgggacagcggcctgatgcgcctggacttccttgtcgcccgcaccaagggcccggtgtacgaggtgctgtacttcgccaacaagctgttcagcctgctgctgggcgtggtgatggtcgtcgccttcgccgcccagtatccctatgtcagcacccgcacctattccaccttccctatcccggtgccctatacggtgcagtatttccccatgtgcctggctggagcctatatggcgctggagtctctgcggcagatggcggagcacgtggcagaaaaggcccggggcagccgggcgcaggtataagggagggacacggatatggtaatttttctgatagcgtttgtgctccttctggtcattggtgtccctatcagcatctccatcggcgcctccgccgtgctggggtgcctgtctctggggtatcccttggtggtcatcggccagaagatggtcagcggcatcgactctttcctgctgatcgcagtgcccctgttcattctggcgggcaacctgatgaatgcaggcaagatcacggagaagatctttgatacggccaaagagctggtgggctggatccccggcggcctgggccatgccaacgtggtggccagcatcattttcgccggcatgtccggctccgctgtggccgacgccggcggcttgggcgccattgagatggaggccatgaaaaagaacggctatgacgaggacttcgccggcgccgtcaccgcggcctcctccgtcatcggacccatcttcccgccctccatccccctgatcatctacggaagtgtggccagcgtcagtgtggaccagctgttcatgggcggcgtggtgcccggcctgctgatgggcgtactgctcatggtgatggtcctttactttgccatcgtgcgcaggtatgagcgccaccccttccgcctgcgggccctgatccgccagttcctgggatccatccccgccctcatcaccccggtcatcatcctgtgtggcttcgtggtgggctggttcacccctacagaggcgtcttccattgcggttatctactccctgctgatcgccctcttcctctaccggaccctggactggaagagcttcaagaagtgcctgaaggactccgccatctcctctgccaacaccctgttcatcatcggcacctctaccctgttcacctacgtcatggcaatggagggcatctcccgccagttcgctgatgtgatcctgggcatcagcagcaatcccaacgtggtcctgctggtcatcaacgtcctgctgctcgtcctgggcatggtgatggagcccggcgccatcctgaccctgatgatccctgtgctgctgcccattgccaacggcctggggctggacctggtccacttcggcgttatggtggtgctcaacctgatgatcggtcaggtgaccccgcccttcggcgtgtgcctgttcgtcatctccgacgtaaacaagctgaagctggaacggctgtatcgatccatcctgcccttcctggtccccttgattttaacgctgattctggtaacctatataccggggatcgttacggccctgccaaacgccctgctgagctgagaacgtcccctgttccaaatcatccaattgttagagaggagtacatcacatcatgagcgatcaactgttcagcgtagaaaataagatctgcatcgtcaccggcggcctggggcagatcggcaagaatttcgtccaggagctctggaagcggggcgccagggtggccgtgtggggccgcaccgtcaacgacgagcgcatcgccaagaccctgggggaggaggccctgaagacctccgctctgcgtttttactctgtggacatcactaagaaggaggagatgaacgccgccctggacgacatggaagcggtctggggggacgcccctgatgtgctggtgaacaacgccggcatcgacactcagccctctgcgcctccggaggtgtccggtccctttgagaacttcccggaggagattttccgggaggtagtggatgtgaacctggtaggcaccttcctggcctgccaggcggtgggcgcccggatggtcaaggcgggcaagggcggctccatcatcaatgtgggctccatctatggcatgctctctcccatccaggacatctatgcctataagaaggagatgaccggcgtccccttcatcaagccggtggcctactctgccgccaagtccggcatctacaacctgacccgctacctggccacctactggggcaagcagggcatccgggtcaacaccctcacccccgccggcgtgtggcgggacacccaggacgagatcttccaggccaacttctgcgcccggatgcccatgggccgcatgtctcaggagaatgagtacaacggcgccctgatcttcctggcctcccaggcgtcctcctttatgacgggttccaatctggtgatcgacgggggctggacagcatggtaaacgtgaagccggagcagttccaaaagatctggtcggccctcatcacccccaccaacgaggacgagagcgtcaattatgaggccctggagcgcatcgtggagctccagatccaggacggcgcggagggcttctactgctgcgggtcctcgggggaggggctgctgctcaccctggaggagcgcaagcaggtgctggagcacgtgctcaaggcggcggacgggcgggtgcccgttatctcccatgtaggcaccatccgcacccgggatgtggtggacctggcccggcacgccatgtccgccggggccctggcggtgtccatgatcccgccctactactataagttttccatggacgagatcatgggctactacgaggacgtgatccgggccatccccgatgtgcccgccatcgtctataacattccccagttcaccggagtggagttcagcaaggaaaatgcgggacggttgctgtccaacgagaacatcgtaggcatcaagcacacctccaccaacctgtacagcctggagcggacggggcaggcattccctggcaaggccctgatcaacggctttgacgagcaactgctgggagctctggctatgggctcctgcgccaccatcggcaccacggtcaacctgtttgcccccctgttccaccgggtgcgggacgcctttgaccggggggacatggcccaggcctaccgctggcagcacgccatcaacctccgggtggaggagacggtgaagctgggcattttcaacgccatgaaatacggctggaccctgcggggggtggactgcggcttctgccgcgcccccttccggcccctggacggagcggccagggagaagatggcccagctgatggccctgcccctggagccggtatgagctcccggcccgtcagattcgtatcctgatcgaaaagagagagacagcgcccgccgcggctccaggccgcggcgggcgcacagcattgaggcagccggacccgcatcccgggagcatgggggagaaaagtcctttcaggccgtggaaagaaaagatttttgtggcatccggggagatcttgtggtaaaatggggccggtcattcggtctggggctccggacccaggcttctgaaaagaaaggaaatcccagatgatgatgaaacgatccatatccctggtcaccgcactctgtctgctgtccctctgcgcctgcgccgctcctggcggaagggcggtgtcccccgcgtcggcggacggggagatggggagctctgtgagcttcacggacagcttgggcagtaccattaccctggaggaagcgccccagcgggtggcagccctgatcggcagctacgcggagacctgggtcctggcaggaggggaggacacgctggcagcggtgacccaggacgcctacgatgagcgggggctggagctgggggaggatgtgaccaacgtgggctccaatcagaccccggagctggaggcgcttttcgctgcccagcctgacctggtgctcctgactcccgatctggacggccagctggcgctggcggagcccctggctgcggccggcattcccgccgcttggttcaaggtggagtccttctccgactacctctccatgctggagatctgcacccgtctgacggggcgggacgacctgtatcaggccaacgggctggatatccaggcagagatcgaccgggcgcttgcccgtgtcccggagggggagcaccccacggtcctgctgctgcgggcctactccaccggcgtccgggccaagaacagcgacaatatcaccggcgtgatgctgaaggatctgggctgtatcaacatcgcggacagcgacagcggactgctggaggagatccagatggagtccatcctggcggcggacccggaccatatcttcgtgaccaccatgggctccagcacggagaaggcgctggacagcctgacggagctgttccacagcgacccggcttgggagtcccttgcggcggtgaaagaggggcgggtccatatcctggacaaggccctgttccactacaagcctaatgtgcgatggggagagagctatgaagtccttgccgacatcctatacggcggcgcgtaagtgggggatcatcctcctgctggctctggccagtctgggggcggctctgctgagcatgagcttcggctccacccaagtcccgttttcagagatcctgaccgccttgatgggcggtgagacccaggcatacaatatcgtggtctatgcccgcctgccccgcaccctggcggccctgctgtgcggcagtgccctggcggtgggcggggtcatcatccagggagtgctgggcaaccccctggcggggcccaatatcatcggggtgaatgccggcgcaggcctgggggcagtcctctgcgccgccctgattccgacctctatgacggcggtcccggtggcagctttcctgggggcgctgggggcgtgtatgctggtgtacaccctggcccggaggaccggggccagccgcatcaccctggtgctggccggggtggccatcagcagcatgctctccgccgccatcgacgcggtctccatcctgttcccggaggccgccctgggggcaggcagctttatggtgggccggctgtctggggtgacagtggccgccctgaaggtgccggccctgctctccctcctggccggggcgggggcctttgccatgagctatgagctggacctgctcaccctgggggatgaggtggcccagtccctggggctgtctgcccgggcggcccggaacctcctgcttaccctggcggcggtgctgtgcggcgcggcggtgagctttgccgggctggtgggcttcgtgggcctgctggtgccccacgcggcccgcttcctggtagggggggaacacaagtacctgctggctgcctccctgttcctgggggcggcgctggtgacagtgtgtgacctggcggcccgggtgctgttcgtcccctttgagctgccagtgggcatcctgctctccctgatgggcggccccttctttctgtggctgctgttccggcagaggggagggcggcggacatgatggagctatgccatatcacggcgggctacggcggcccgccggtactgagggacgtatccctggtctttgagccggggaaggtcaccgtcctggccgggcctaatggctgtggaaaatccactctcctgcgggtggcggcccggctgatggcaccggaacggggagaggtaaggatagaggggcaggacgtgtcccggctctccgccaagcagtttgcccggttggcggcgctgcttccccagagccggccgctgcccggcatcacggcggggagcctggtcctccacgggcgcttcccctatctgggctatccccgccgctactccagggaggaccgggaggcggcccgccaagccatggagcgcaccggtgtggccgggctggagggggtgcccatggcccacctctccggtggacagagacagaaggtttatctggccatggcgctggcccaggacaccccagtgctgctgctggacgagcccaccacctttctggatatcgcccaccagctggagctggcggagaccgcccggacgttggcggaggagggaaaagcggtggtcatggtcctccatgacctgaacctggccctgagctgcgcacaccgggtggcggtgctggaggagggacagctgcggcgggtgggtgcgccggaggagatctacgcctccggcgtgctggagaaggtattccaggtccgggcccacagcgtggagacggcgaagggggagcggcagtacctcttcagccggctgtgagagcggaggggggccaccctgcccgtttccttgtatgataaaaagagccgtccccctgagataggggaacggctcttttatgctgatcagcggatcagccggcttgagagggagccgctggaagccgccctatgagaatagcggtgcctgctccggcggggaggagccgttcagttgtcgtcctggagggcatcgtagtccgtctcaccggtccggaccttgaccacgttttctacgttgtacaggaagatctttccgtccccctgattgccagtgcggagggctttttccgccgcagccaccaccagggcggggtccaccctggacaccacgatgtccacctgaatcttaggaagcaggttcatgcttattttgacgcccctgtactgccccaccttgcccagctgggtgccgcaccccatcacgttgctcaccgtcatgccggtgacgccgatggccgccatggtgtccttcaggatggagaagcgctcctcccgacagatgatggtcaccttggtcagcttccggccggaggggtcaggcgcaggccgggattccagcgcggccggcacaagtccggagaggtccaccggtccgccggccccttctccgcctagggcgctgggggctgcggggcggaagtcggcgtaggcggaggccagggcgtgctctgtgatgtccaggccgatgatctcatcctcggcggatacccgcagaccgatggtcttgtcgatgaacttgaacaccaggaacatggatacagaggcataggcggcgatggcagctacacccatgcactgcacccccaggtggtagagaccgccgccgtagagcagcccgctggaggtgttgaacaggccgtccgccagggtgccccagatgccgttggcacagtggaccgctacagcacccaccgggtcgtccacgtggagcttgaagtccagcagctccaccaccagcaccaccaggatgccatcgactgcgccgatgaggatcgcgcccaaggcgtctaccgtggcacagggggcggtgatgcccaccaggccagccagagaggcgttcagacacatggagacgtccggcttgccgctgcgcacccaggtgaagaccatgcaggtgaaggtggccacggcgggggcaagggtggtgttgcccaggatctgggccagctgggcggcatctgcggcggcggcgccgttgaagccgtaccagcagaaccagaggatgaagcaccccagcgcgcccatggtcagggagtgcccggggatggcgttgacctggatgcggccgtccttttcccgggtgtacttaccgatccgggggcccagcatccacgcgccgataagggcagccagtccgcccaccatgtggatcacagaggagccggcgaagtccacatagccgaactggaccagccagccctggctgttccagacccacccggcctcgatggggtagaccaccgcgctgatgacgccggagtacacgcagtaggccaggaatttggtgcgctccgccatggcgccggagacgatggtggccgctgtggcgcagaacaccagctggaaaaagaagttagaccagtcgaaggcatagaagttcgtaaacatctgatactccggcatgccgatcaggccgaagaaatagttctcactgttcatgatgccgtagcccagcaggatgaagactaccgttccgatgcagaaatccattaggttcttcatgatgatgttgcctgcgttttttgcccgggtaaatcctgtttcaaccattgcgaatccgcactgcatgaaaaagaccaggattgcgcccatgagataccataccgataaatccatcttctctcgctcctttttacacaagggcgtgcggtccggcaccttcgccgtcccgcacgcccttgtgcgtttgattttggttcctctgctgcagcaaaagaagcaggcgccgccgggtctgatcccgacagcgcctttgcttgagtgtgagtttatacctccggttttctcctgtcaagatgcaggaagaaagtttgtgtgagccaatcaaaatgcagggagacagggcagaccctcttttccaagttcaacaaattttttgcgtgccagagtcagaaggagagggaagcgtttctcaaaaaatagaaaagaaatagttgaatgtaaaaattgcataaaataggagggtgctcctgggaatggccatatatttgcaataaagataaaatataatttcaaaaaatattgactttcacgaagtagtgtactatactttcgcccatagctgaaaacagagggcctcatgtctctgatagagacataatttcgagatgcctaaacttgaaagaagggggtgaggttcctgcaaaatgactaggcttgggacgggagccctgcggtgaaagacggctatgtgcgtatgggagagacagcgcagtctcgcggcggcagtccgggagtttgactgccgtatttttgtaagctgacctggaaaggggaaatcgagatgaacagagaaggctatcagcagcgcggcttgtatgacccggcgtttgagcacgatgcctgcggcatcggagccgtggtggacatcaagggctgccagagctatgagacggtggacagtgcgctgaaaatcgtggagaagctggagcatcgagcgggaaaggacgctgagggaaagaccggtgacggcgtgggcatcctcctccagatctcccaccagttttttcagaaggcggccacggagtgcggcatccaactgggggaggcgcgagactatggcgtaggtatgtttttctttccccaggacactctcaggcgcaatcaggctaagaagatgttcgaggtcatcgtggccaaggaaggcatggaatttctgggctggcggaaggtgcctgtctgcccagaggtgctgggccagaaggcactgtccaagatgcccaacatccagcaggccttcgtgaagcggccgggggatgcggcccggggactggagttcgaccgcaggctgtatgtggcccgccgagtctttgagcagtccaacgacaacacctatgtcccctccctgtccagccggacagtggtatataaggggatgttcctggtgggggaactgcggaagttctacctggacctgcagagtcgggactaccacagcgccatcgcatgcgttcactcccgcttctccaccaacaccaatccctcctgggagcgggcccaccctaaccgcctgatcctccacaacggcgagatcaacaccatccggggcaacgcagaccggatgctggcccgggaggagaccatgtccaacccggtgatcgacgacgccctggacaagatctaccccgtggtcaacggggccgggtccgactcggccatgctggacaacaccctggagttcctggtcatgagcggcatggacctgcccctcgcggtgatggtcaccatcccggagccctggaccaaggacggcagtatcagccgggccaagcgggacctgtaccagtattacgccatcatgatggagccctgggatggtccggcctccatcctgttctccgacggcgatgccatgggagcggtgctggaccggaacgggctgcgcccctcccggtactatatcactgacgacggtaagctgatcctctcctccgaggtgggtgccctggacctggaccccaggaagatcgtgaagaaatcccggctggagccggggaagatgctgctggtggatacagtccaggggcgtatcattgatgacgcggagctgaaggagacctacgccgcccgccagccctacggcgagtggctggaccggggcctcatccggctgaaggacctgccggtccccaacaaaaaggtgcccggctactcccaggaggagctgacccggctggagaaggccttcggttatacctatgaggatgtgaaaaacaccatcctccctatggcacgcaccggggcggagcccaccgccgccatgggggtggacatcccactggcggtcctctccgaccacgaacagcccctgttcaattacttcaagcagctctttgcccaggtgaccaatccccccatcgacgccatccgggaggaggtggtcaccgacaccaccgtctatctgggcaacgacggcaacctgctggaggagcgggcggacaacgctcacgcccttcaggtgggcaaccctatcctcacctcggtagacctgatgaagatccgggacatgaagcagcccggcttccaggtggagaccgtctccatcctatactacaagaacacccctctgaagcgggcgctggaccacctgttcgttgcggtggaccgggcctaccgcaacggggccaacatcgtcatcctctccgaccggggggtggacgagaaccatgtggccatcccgtccctgctggctgtctcagccgtggagcgatacctgatccgcaccaagaagtgcaccgccgtgtccatcgtactggagtcagcggaaccccgggacgtgaaccacttcgccacgctgctgggctacggtgcccgggcggtgaatccctatctggcccatgcggccatcggctccctcattgaccaaggtctgctggacaaggattaccacaccgcggtgaaggactataaccaggccatcctcagcggcatcgtgaagatcgcctccaagatgggtatctccaccatccagtcctaccagtctgcccagatcttcgaggcagtgggcattgaccgggtggtggtggacgagtatttcactggtaccctcagccgggtggggggcgtgggtctgaaggagatcgctcaactggtggatgaccaccacagccgggccttcgaccccctgggcctgggcggcgaccctaccctggacagccggggcgagcacaaggcccgcgctggtcaggaggaccacatgtacagcccccaggtcatccatctcctccaggaggccacccgcaggggggactacaaactcttcaaggagtacacggccctggtggacgacgcctccaagccccacaccctccgcggcctgatggagatgcagtatctggacaccccgattcccttggacgaggtggagagcgtggactccatcgttaagaggtttaagaccggggctatgtccttcggctccatctccgctgaggcccacgagtgcatggcggtggccatgaacaccctggggggcaaatccaactgcggggagggcggcgaagaccccgcccgcttcggtaccctgaaaaattccgccatcaagcaggtggcctccggccgcttcggcgtgaccagcgagtatctggtgtccgcccaagatatccagatcaagatggctcagggggccaagcccggcgagggcggccacctgccggggaagaagatcacgccggaggtggccaggacccgccattccacaccgggcgtcaccttgatatccccgccgcctcaccacgacatctactccatcgaggatctggcccagctgatctacgacctgaagaatgccaaccggcaagcccgcatctctgtgaagctgtgcgccgagccgggagttggcaccattgcctccggcgtggccaaggccggggctcaggtagtactgatctgcggctatgacgggggcaccggtgccgccccccgcagttccatccattctgccggtgtgccttgggagctgggggtggccgagacccaccagaccctgatcatgaacggcctgcgctcccgggtcatcgtagagaccgacggcaagctgatgagcggccgggacgtggccatcgcctgcatgctgggggcggaggagttcggctttgccaccgcccccctggtcaccatgggctgctgcatgatgcgggtatgcaacctgggcacctgcccggcagggatcgccacccaggacccggagctgcggcggcgcttcaccggaaaaccggagtatgtgatgaacttcatgcgcttcgtggcccaggagctgcgggagcacatggcctgcctgggggtgcgtaccgtggacgagctggtgggccgcaccgacttgctgaaggtgcgggagcacgccgtcaacgagcgggccgccacggtggacctgtccgccattctggataacccgtttgaaggggcgcaggtcaagcgccatttcgaccccgcggacgcctatgacttccagctggagaagacggtggacatgagggtcctgctgaagaagatgaagggggcgctagagaagggggagaagcggacggtgaacgtccccgtcaccagtaccgaccggaccctggggaccattttcggttccgatatcaccaggctccacggcagcagcctgcccgacgacaccttcactgtcaagtgtaccggcggcggtgggcagtccttcggtgccttcattcccaaagggctcaccctggagctggaaggggactgcaacgactatatgggcaagggcctctccggcggaaagatcatcgtctatccccccaaagggtcccctttcaaaccggaagagaacatcatcatcggcaatgtggccctctacggggctaccagcggcaaggcattcatcaacggcatggcaggggagcgattcgccgtgcgcaactccggcgcctgcgcggtggtggagggcgtgggcgaccatggctgcgaatacatgaccggcggccgggtggtggtgctgggacctaccggcaagaacttcgcggcgggcatgtccggcggcatcgcctatgtgtgggatgaggaccgggacctgtacctgcggctgaacaaggcgctggtcacagtggacccggtgacggagcggcaggacatccaagagatccggaccatgctcaccgagcatgtggaggccaccggctcccctaaggcccgggagatcttggaccacctggaggagaaggcagcctgtttcaagaagattctgcctcgggactacgacagaatgctgcgcaccatcgcggaatttgaggcccagggcctgagccacgaacaggctgaggtggaggcattcagtgccagcaccaaggaataaggggggagaaagtgttatgggaaagatcactggatttctggaatatgaccggcagactgatccggcggagcagccactggaccgcatcgagcattggaaggagttccacccccgcctgtccgaggcggaccgccgccagcagggggcccggtgcatggagtgcggtgtgcccttctgccagtccggcgccaccctgggcgggatgacttccggctgccccctgcacaacttggtgccggagtggaacgacctgctctacacggggaacctgccccaggcgctggagcggctgctgaagaccaacaattttcctgagtttacagggcgggtgtgtcccgccctgtgcgaggccgcctgcacctgcggcctccacggcgacccggtcaccgtccgggagaacgagctgggcatcatcgaggcagcattcgagcggggcttggtccagcctcggccgcccagagtgcgcagcggcaagcgggtggcggtggtgggctccggccccgccggactgtcggcggcggaccagctcaaccgccggggccacagcgtcaccgtctttgagcgggacgaccgggtgggcggactgttgatgtacggcatccccaacatgaagctggagaagaagtatgtcatgcgccgggtggagctgatgcgggaggagggcgtgtgtttcgtcaccggcgtggatgtgggccgggacaagagtgcccaggagctgctggacgagtttgatgcggtgatcctgtgtaccggggccaaggagccccgagatctggcggtgcccggccgggaggccggcggggtccatttcgcggtggactatctggccgccaccacccgcagcctgctcaactccaagctgaaggacggcacttatctcagcgccgcaggcaaggacgtggtggtggtaggcggcggcgacacgggtaacgactgtgtgggaacggcactgcgtcatggctgccgttcggtggtgcagctggagatgatgcccaggctgcccgaccagcgggccgacgataatcgctggccggagtggccccgggtgtgtaagaccgactacggccaggaggaggccgtcgccgtcttcgggcgggacccccggatctatcagaccacggtgaaggaactgctgaccgacagcgaggggaacctccgggcggtgaaggtggtccggctggaggcggggacggacaagaagacagggcgcactgtgatgcacgaggtagcaggcacggaggaggaactgccctgccagctgctgctcatcgccgccggcttcctgggcccccaggcctatgttgccgagacctttggattggagcgcacccctcgctcctgtgtcagcaccgcccccggcggatacgccaccaatgtgcccaaggtgttcgccgccggagacatgcgcaggggccagtccctggtggtctgggccatccaggaagggcgcgccgccgcccacgaggtggacacctttctgatggggtacagcaattaaaagcctgaccgcaggcgcggtcagctgggtgccagggcgaggaccctggcgcaggtacggctctgccggcctgagcatctggatcccagaaggatgagccgcccagagacggcgggataaaaaatgaaagacacgctgaaaagcgtgtctttcgttttcaacagcagatcagaaaaagatgcagtggctgtcggtctgtatcaaaatccaaatcgaagcccggcggagcggattcgatttgaaaaggaagagcaagggggcgggcggatgacgtcttttttgcctcaggcataaaaagacgtggtcacaaagcgaactttgccaccacgtggaaagaacggtcaaaaccgatatttttacgagggcaaaaacagccgcccacagggcggccccaagccggagcccagcggagcgggtccggtttggaagagaggagcggcagaatgagcgaacgataagctttacaatgaaatgaaaaagctcgtcgcaagtgatatgtcgcttgcgacgagctggtacgggtagtgggagtcgaacccacacggttgcccactggaacctaaatccagcgcgtctgccaattccgccatacccgcgcgaccacgtctatcataaaggattgtaggaaaaaagtcaatgggcattgcggagaaggggacgccccggaaaagggcgcccccaggcagaagattttggaatggggaagatggctcactctccaggggaatggtggtgcagggcggcggtcagcaggaccacgcccgcagccaggagcccggattggaccaggcacatgcccccgggcagggaaaaggccgggtccagtgtccccagggacagggggtactgggagaagaaccggccgttccacagggagagcagctcgggaagggggaggagctggagcaggaagggcaggggcatccacaggtagacgagccaggggcgcaggcggcccagcagccagccgctgcccagggcaaagaccagagctggtatcaaggatatggcggcgggaaggaacagactgccccagctgtaccaccgaaacatgcgggtataaaagacggcggacagcagcaggacggcgagggactggaggacggtgccggtcagtgccgcccccagccgggccagggcgtattgccagggccgcacaggggtggcggcggtgaggactgcggcccgccgctccgcccctgaagtgaaaaaggtgagaaagaacagcacaccgatccacagcagggggagcaggcggctgaggtaatccccgaaggtccagggggagaagggggcagtgtgggacacccccagaatggaggcgccggtgagtacctgccagccgtagaacagggtcacggccagaatgccgaaaaagaacttgttccacagcaagcgcttacactcatatcgaaatatcttgaccaaggtccagctcctcctctgtcagcccgcaggcgtctaaaaattcttgataggtgagatagggatagctccaatcgagctcacggttgaacaggccgcgcaggatctcatccatggccgcctcaccccctaccagcttttctgccctcaaaattttcaggggcatctcgcagtactgccgcatgccggtcaggctgttggtgatggccagctgctcctcctcgggcagcatggccaggtactctgggtttcggacgtagaagtccaggtagtagtcctccacctcccgctcccacgcctccacatagtactcccgcgcgtagtccaccccgtagagctccttgacgatgcggtaggtggtgtacaccgtcagcccctcggcggaccaggggtctgcggggtcctcggagtcaaacatgttgcccaggccccaccactggtggaccagctcgtggatcatcacctcgccggggacggcccccttgccgccgtcgtggagattggcggcagtgaagtccatctcgtccagcaggctggcgcctccgccggcgtagcccccgccggccacccggctctggatcagcttcagggagccgccggcaccgaaagacagagggccgtagtgctccgtgcagtagtccaccacggcccgcaccgcctccgccgccctggcctgctccatcaccgcctgatgcttccggccatagtagagctggatggtggcgccgccggcctggatatcctgtcggatgtagtccccggcgtagacgatgccgccagcgctgtcatcctcatagcgccaggtggcggtgccgttgccgtgggtctccaccacctctgcctcgctggtaccgaaggggatgacggtcatggagccgggcacggtgagctccacggtggtgggatagccctgcccctctggcagaacattgagcagatagggcatcaggttctgattctccaggcacagataggctccgctgatctcgggggagccctgggtggtctccgcaatgttccagtccctggggaagccgccgtactccagcaccagctccaccgcgccgtccgccgggagggcgatctcccacagagccatgttggactcctcgtagccggtgcggacgggggagatctccgccccattggcacgggcagaagtgatgtcgtaccccgggtccacaccgaagcagaccgtccacccctggccggaggtgttctggaactgataggcggctcggccctccaccgtgccagcggcggtgtctgggaatacctgggcggtgcgcctggaacaggtgactccctcggcatactccagttcgaagagccgggaggcggtgaggtccggattgctgttgtcaaagaagggctgagctgcataggccgcaccggaacaggccaggagcagcagggcgatcaacggccgacagacccgccgggcgctccgggccagggagcctagaagccccttcccatactgccggatacacagccaggagagggtccaaacccccgccagggctgccagccaggtcaggcgcatataggccaccgaccggtagagccggaagttggagaagtcatcggacagggcccatacgcaggggttgagccagcacagctgccacttcccggcccacaccgtcagactcaaggcggcgaaggcggcaaagaggaccagggacaggtcagagcgccgggtgaactgataggcggcggccgccgccagaatggccagccacagggccagccccatgaacagcagataggagagcaggtagtccgtgccgccaaagacggagccgatgagctcccggctgatggggagccaaaccagcatggtgaggcccagacccaggacagcggcagcggccagggcgggcaggcgtaccagggccatggtcaggggggagaccgcagcgtccatcagcatgcccacccggctgcgctccgtgcggtccagctcgtacactgtcagcaggccgaacaggatgccccccaccacgcccccggccagggcgggatcagccagatacatagacagcatggtgtcggcggcggtgggcttgtacagcaccagcccagccagtggggagagcacagtcagtaaaatgaccagccaggtcaggcggctttggaatagacgtcccagctccagacaaaacagatgcagagctttcattggaccgcctcccgggagatgaggtagaggtaggcgtcctccagggtgggttctgcgggctgagcgaagcgggggaggacatcggccaccgcccggcagcggatgccctggctggtgttcacccgggccgtaatatgcagccccgcctcctgggccgcctcccgttcccagaacacccccacgtgtccggcggcggactggatcagggcttccggagtgccggtgaacaggaccctgccctggtccataacgaccagctggccgcagaccgactgcacatcctcaatgatatgggtggacagcagcaccagccggtcctgggctgtctgggaaaagaggttgcggaagtggatgcgctcctccgggtccaggcccacggtgggctcgtcaaagatgaggaactccgggtctcccagcagagcctgggcgattcccacccgctggcgctggcctccggagagagtgcggattctggcccggcgcttctcctccagattgacggcccggatgacctggtcgatggcggagcggctgttcctcagccccttcagggcagccatgtagtccaggaactgatagacggtgagctcgtcatacaggccgaaggactgggggagatagcccagacgggctttgagcgcccgctgggatcggtccagcgggcgcccgtccaccaggatggagccctgggtgggcaggagggcggccaccagcagcttcatcagggtggacttgcccgccccgttggggcccagaagccccaccaggctggggctggtcaggtccaggtccagtcgctggagggcctgcttcccgctgggataggtcatagagagatcttggatttggatttgcatgggtcaacatcctttcgtcttgggttccatgtcaggataccggtgcaatgtggagagcgattgaagaaaagatgtgttttgtatgaagatggcggagaggccagggcaatcatgtccccgcccgggaggcggacggggacagatggcttaggcctgagagatggcccggagagcggtgataagaggaggctcgcctgggggagaggggaggtctgggagggtgcccagctcctcgttgctgctcccgtcgggattgaggccgaatacaggggtgtactggaccaagatcccgctgttgggcagctggagaaagaccgggtctgtcccgatgccgtctccgctggtggcactgcccaccagcgtggcaaaaccggtctgttggcagaagagggcgaaggattcggaggcggagtagacggactcgtctaccaggacccagatgcggccccggaaggggctgggctgatcagccggctccaccctgtggcagactcggacaaagtgggtggctagatccaggtcccccggctcaagatgaggcagactggggagctggttcagggggaggagacactcggcgggaaagacctgatccaaataaggggcgttgttgcggctgtggcggaccagggccaggtgctcgctggacaggggctcatcaatgtggggggcgaccaacagctcctcccagtaagcctcgctcccgccgctgttgtccgtcagatcaaagatcaggtcggtgcagtccccacactgccggtagaagttagacaggatggcacggtccgcctcgtactcggcgggaaaactgtcgattttcacatagcccaccccactctccggcaacaggagggggatcacgccgccagcagcgggggccggcgtctccagggccggctcctcttcctcacctgaggagttaatggcgcggtccagggccaggagggagcggtacttttcgcgggtctctttccgctccagaatatcggcccaggccgtctgcccgctccgccggtagagcctggcggatgggaggagactgaagtagtcggcgggctccacaatggacagatgcccgttgttccccagcaggaacagggtgctgtaaaccgcttgataaaaggtctgatcgctgtcgctttcggccaccatgtcccggtagctggtgtagatcccttccacatccaccccttcccgatctaaaatcccccagcagggatagctgtcggccagaacagaccagagatacttgtagtcctccatccgctgctctgcggtcagacccagcatgtgatctggagaaggggtgtcctgggcctgactgagcggcagactcagagacagggcggcggcagctagtactgccgccgccatctgtttcctcaatttcatacaaacacttcctttctggaaaacaggatatcgtgcctttatgaaaggagtgtgaagggggccttacgactttctgacacaaaccttacagaactcttacagcatttgaatgttttacccaatagggagtacaaacaggagggcattgattttctgccggggcatgttatactaaaagaaaaatggtgcagggaggcggacatggtgggggagaagaggctttggaagctggaccaggggctgtgcgtgcttttgatgctgttgatccccctccagctgtgtctcagcattgccaacttgttttacgggatagacaagggttatggacacagcttcccactatggtcctatgtcctgagtgcggcttatctgtgcgtcgtgttgtccgccgacggattcatgatctgcgtcggacggctggagctgtccaaattcgtgggcaggtactggctctccgcctgcggggcactggcggcagcggccctgctgaggctggtgccggagggcgggatgatcgctctgctcctgctggcatacacgcctgtcctggtgttggttccactgctggaaacgctggggatcggagagatatctccgatgatggcagccgtgggcatgttctgcttgtgcaactggctgatctgcaggtgctttgtgaggaagaaataggatggcacaggtcgggggccaaagctccgccatataaacagcatcccgcccggctgatagccgggcgggatgctgtttatatggcaggtgcgccggagcggaggggatcaactggccgtttccggcggaaaaatcacacgggcccgcacgccgtcggtgatattctcgatctcgcaccgggccccgtgccgatccaggatcatcttcaccaggtagagccccagaccgctgccgccggtgcgtcggttccgggactgctcctcccggtagaagggctcaaacaggcgggggagggcctccgccccaatctggacaccggtgttctccaccaccagggtgggccgcccgtccaggcgcagggtgcgcacccggatgcgggccccggcgggggagtacagggccgcgttggacagcagattgtccaccgcccgtcccagcaggctgggatcgccccggaggacgaggccgggggccagggacagggagaggtccatctcccgctgatccagcagctccctgtcctgctccagctgttcctccacaagccgggagaggtccacctcttccttccgcagacccgtccccgattccatccgggagatggtgaggatctcccccaccagggcctccatccgggacgtgacctgaagggagcgggccagataccggtcccggtcccgatagacgcccacctcgtccagcatcccggtgagctgccccttcaggatggtgacgggggtcttcagctcgtgggaggcagcggcgaaaaaggcgctgcgctgccgctccagctcccgttcccgctccatctctcccagcagggcgtcgttggccgctctcaggtcggtcagggcggcggagaggcgctgggacatacgatccagactgcggcccagggcgccgatctcatcccggcgggtctccccgcagatccagccaaagtccagctctgccattttccccgcaatgccgctgaggcggacgatggggcgggtgatatagcgggaatagaccactgcgcacagggcagagaaggccagcagcaccagcagcacccagggggccatccgggccagggccgccactgccaggttttccgagcgtactccgggggagacatagagctcgcaggtctgcccgccggcaaaggtgacctcggtgacctgggtgtcgctggctatggagagggcgtattcccggccatcctcctggatgatggctgcgggcgggtccccgttccacagggactggatctccgatgcggtgaacatggagtcggaggtgacagtcactatcgtgctctcgtcctcatagaccgactggatggagagctgggagttggtgtcctgaacgatgtgcccattggcgtccaccagcatgacggaggatttggaggcgcggatgaactcgtccaggatggggccgcagtcctccagggcggtgacagacaggcgttccaccagcaggtcagtctgggcccgcagatcgtcgctggccgccgctgtgtaggtgatgggggtggcccaggcaatcagggcgaaggtgatggcccccgccccaagcaggatgaggagggtaatgaggaagatgcggacagtgaggctctcatggagcttccttcgcagcacgatagcccacccccctcactgtctcgatgcagtcgatgcccagcttgtgacggagattcttgatgtggctgtccaccacccgctcgtccccgaagaaatcgtagccccacagcttggccagcagcacctcccgggtaaagacccggccagggctggagagaaaggtgtggagcagctcgaactcccgggcggtgagctccagagaccggccggccagccgcacctccatggcctccgggtccagggtcagatccccgtagcggagaagggagggcgcggtgctgacccccccggcacggcggaggatggcggcgatctttttcagcagcaccggcatggagaagggcttggtcacatagtcgtcgatctccaggtcaaagccccgaagctgctccgcctccccgtccagggcggtgagcatgaggatggggacctgggattcctggcggatcagctcgcacacgccgaagccgtctattttgggcagcatgatgtccaacaggaccaggtcaaaggaggcggagcggaacagctccagggcctccaccccgtctccggccaggctggtctggtagccggcctgctggagataggcggagagcagctcctggatgtccggctcgtcttccacgatcaggattcggttcattttgttcaccccaatgacaggataacaggaaaatatgaattttatatggagagggacaaaaaaaccagagcgggaggggaagaggcggaaaaagagccccggctgccggagcagagggctccggcggccgggggcaggacagggtcagtccccgtacatgggggtggaaagatagtgctctccggtgtcggggagcagggccacgatggtcttgccccggttctccggccgccgggccagctgcactgcggcccagaccgctgcgccggaggagatgccaaccagcaccccttccagccggcccagccggccgcccatggccagggcgtcctggtcctccacctggatgatctcgtcatagatcccggtgtccagcgcctgagggacgaagccggccccgatgccctggatggcgtggggccccggcgttccaccgctgagcacgggggaggaggcgggttccactgccacgatctgtacgtccggcctgcgggatctcaggtactcgcccactccggtgatggtgccgccagagcctaccccggccacgaagatgtccaccgtcccgtcggtgtccgcccagatctccgggccggtggaggtgcggtgggcggcgggattggctgggttttcaaattggccggggatgaagctgccagggatctcccgggccagctcctccgccctggcgatggcccccgccatgcccagccggccctcggtcagcaccacctcggccccataggccagcaggagctgacgccgctcctggctcatggtgtccggcatgacgatgatggcccgatagccccgggcggcggccaccagtgccagaccgatgcctgtgttgcccgaggtgggctcgatgatgacagagccggatttcagaatgccccgggcctccccgtcgtccagcatggatttggcgatgcggtccttggcggacccgccggggttgaagctctccagcttccccaggatgcgggcgctcaggcccagctcccgctcaagatgcgtcagctccagcagaggcgtccccccgatcagctgatctactgaggtatagatctttcccatagcgcttatcctccgttctttctaactgtcaggtagtttagggggattataggcttttccccgtcaggtgtcaagaaaaagcggggcctgagacttcaagggcacgcccaacacacgggatttgtgatttttgttgccgtggcgccggatctgtgttataattttgacaaagatacctgaaaaaggaagggaaggagccggctgggccggagcggcccgggtcggaggagagacaaaggaggcctgttatggtagaagtcaccactctggatctggtcattattggactgtatctgctcttcatgctgctggtgggcgtgtggttcgtcaagcgcatcaagaacacggatgactattatgtagcgggacgcacactggggccagtggtcctggccgccaccgtgtgtgccaccattatcggaggcagcgccatgatggggcgggcgggcatcgcctacaccacgggcttcatggccattgccaccgccctgccctatatgctgggcatgtttatcttctccggctacgccgggcgtattcagcaggtgggggagaagtaccacatcgagtccatccccagcctgttcgagtaccgcttcggaaagccggctaaatgcgtcctggctgctatggtggctttcgccatggtgggcacggtggccgcccaggtcaccgccaccgctaccattattaagctgctggggggacaggtgggcatcagctacgagatgggggcttttatcgccaccgccatcttcatcatctataccgccgcctccggactgttcggcgtggtgtacaccgatgtggtgcagtttttcatgctcattatctttgtctacctgatgatcccattttccagtctggactatctggggggcttcgggagcttctgggccagcctggacaagagctacatcacccctgccattgacggcaagatactgggggacatcgtcacctatctggtcttcaccatggcgggggcggagatgtggcagcgggccttcgcggccaaggataaaaagtcagccaagcggggcatgttctggggcaccgccgtctatggcgtgaccatcgccttgctgttcctgatggggctggcggcccagcagatcctgcccaacgtggtggaggagttcggcaccgccgatgccgtgatacctgccttggccatcaagatcctgccccccggcctgacggggctggccctgtccggcatcctctccgtgatgatgagcacggcggacagctatctgctggtctctgtccagacggtggtcagcgacctaggcaagaccttccaccccgccatgaaggagaagcaagagatccttttctcccgcatcgcctcggtggtgctggccctgggggcactggtcatcgccctgtacatcaagagtgcctacgacgtgctcatgttcgcctgggccttctacgcagcggcggccggactgcccgccctggcggctctgtactggaagaaagccaccagcgccggcatcatggccgggatgctggggggcttcgtggtcaccgtggtctggaagctggtgggcgagcccatgggtctgggtgccaccgtccccggcgccatcgcctgcggcgtcctgctggtgggagtcagcctggccacataccggaagcgccccactgtgatggtggaagtgaaataagcgtccgagacgggggaagcgagacggtcgaaaagaggcagtctgccacgggcagggtttgtccgcgtgcggacgcgaactctgcaaagatttttccacagagcgccggccccgccctttatttgggggcagggccggcgctctgtggaaaagcggcatggacgttttatgccgtctggtcaggcaggtcctccagggaggcgaaggtgtagcccatgtcctcccagcgggtgagcagctcgtccaggatctcggcgttggtccgggaggtggagtggagcagcacgatggccccattgtggatgcgggggatgagtttggagaaggcctcctccgccgtaggctggtcatccacgtaccagtccacataggccaggctccagaacacggtgcggtagcccagggcctgggcctggcgcagattctcctcgctgtattttccctgcggagggcggtagaaccgggggagggtctggccggtggtctcctggtacagctgttccagctcctccagctcctgctgaaatttgctctggtccgagatggcggacatgtccggatggtggaaggtgtggttgcccacgatgtgcccctcctgaaccatacggcggatcaggtcgggggaggactggatcatgtgtcccactacaaagaaggcggccggggcctgatggtccttcagcacgtccaggatctgggcggtgtagccgttctcatatccgcagtcaaaggtgaggtagaggaccttctgggtcgtgtcccccacatagtaggcgtcgtattgggccagggactgggcggtggcgttgcccacagggggttccccctcagtctggaaggacaggccccagttgtcggtggaggcggccactgccgccggggcggcagcggggacgggagtgtcctcccgcacagccagccagaacagccctcccagtaccaggcagagcgcagctgcggacagcagcgcggttcggcgtgtgtggtccatagatgttccctcctgcgtgttttcggtcaggtcagcgctaggatgtgcaggagagaggcaaaatatgtaccgcttatgctggaaaagaaggcggaacggcggccttctggccgccgttccgcctggagccaagccgcttttttgacagatctgtgcttaccggtcggccactgcggtccgcatccactttccactcttcacccggagcagggagaccgccgcgcccacggcccagccggcgggaatggaccaccagatggcgttggcgccgaagggggtcagatagaccagcgcgtaggcgatggccactcgggagaacaggttcgccatagagctgagggtgaacgcccccatgtctccggccccccggagcatcccgttgggaacgaagagaacgcccatgaggatgtaaaagacggagacggtgcgcatgtaggccagcccgtagcccatggcgccggaggtgtctcccgggtccaggaacagggagagcagctggctgccgaacaggaagatgaccaccgtgatgaccagggagaagaccacaaccatgaacaggcaggccttcaggccctccttcacccggtcgtacttgccagcgccgatgttctgggcggtatagctggacatggcgttggagaagttcatgttgggcagcatggccagggtgtcgatcttggtggcggcggtgtagccggcgaccagcaccttgccgaaggagttgaccagtccctgcatcatcatcatggacagggagaccagggactgctggagcatggagggcaggccgatctgggcgatgcgctttaccgccgtcatgtggaacagggggatcttcatgttggcccgctccggctcacagggcagcttcttcatccgctggaacatcaccaccagggaggcgatggcacacattccctgagcgatcagggtggcccaggccacccccgccacccccatgttgaactggatgacgaagagcaggtccagcacgatgttggtcaggctggagatcatgagaaagatcagcggcgttttgctgtccccctgggcgttgtagatgccgttgagggtgttgtacaaaaacaggaacaccgctcctccaaagtagatccgcaggtacagccgggagtcatccataatgtccgggtcggtgcccagcagctggagcagagggccggcgaacaccgtccccagggccatgatgatgagacccagcacgctcagggagatgatagcggtggagatggtggtcttcatctcgtggatgcgcctggccccgaacagctgggagaccaccacgttacagcccatagacagcccggaggccaccgccaccgacaaaaacacgatggggaaggaggagcctaccgctgccaccgcgtcctcccccacgaacttgcccactacagcggtgtccaccatgttgtacagctgctggaacagattgcccgccaccataggcagggcaaagaaaaacagcaggttgagaggcttgccctctgtcagatttttaaccatcgtccccttcctctcctcttttgtattgcatgacattttcgatgatccgggacaaaaagctgttatacagtgtccgttcctcggaggagaacccccggcagcagatgtcgttccagctctccaggatcttctggacggccccagcgcgctcctccccagccggggtaagggagacctgcttctcacgccggcactggtcactcacccagcgctccactaagccacgctcctccagacgggccacactccgggctactgcccccttatccagggcggtctgggccgcgatgtcctcctgacgcaggcagtttctgccccacagaaggtagagtatcatgccgtccatgggctggaatcccagaggcgccagctgctctcgaaaatactgctgcttgatgcggcggaaaatctcgctccggtcctgcatggtccctgcctccctttttattgttgtatctatcaacagttgtattttacaataatttcttaacaaaatctatacacaaagctgacaaatttagcgctgccggggggagacaggggaggatgggccggcggttcttggagcagaacaccacacagtccaccttgtccgggagcggctcacagcagatgaacctgctggggaacagggggcgggtcaggacgcagccctctgtaaagcgctcctatgatattggcggtgttgatggccatttctctctcaccgggatgtcctcaaatccctgcttcatatgcggggcaaccggcgcagtgacccgcgcgagcgcggcaatttccttactgggcagctgggccatagcctcgctctccgcctcggcggagaagataatgcttcgggcgtaggcgacgcctgccggggacaggcagagaaaaatcctgcctagggcagaaaatggccgtcatttttgtgatcctgtggtataataggatgacctgtaaaaaacgggcggatcatggggaactccctgggatcgctatggaagacttggaaaggcggtgcagcgatggtctataccacccactatcagtcccctctgggggctctgctcctggcggccaggggggacgcactggccggcctctggctggagggacagaaatactttttgggttccctgaaggagccggcggagcccatggagggccaccccgtgctgctccaggccggggattggctgtcccgctactttgcgggggagcggccggattccggtgagctgaagctggaccccggcggcggggaatttcggaggacagtctgggaggagctgtgccgcatcccctatgggagcgtgaccacctatggcgcactggcccggaccgtggctgcccgactgggccgggccagcatgtcagcccaggcggtcgggggcgcggtgggccacaaccccatctctatcctcatcccctgccaccgggtggtgggggcggacggcagccttaccggatacgccgggggaatcgacaagaagctctggcttttggaccacgagggggtggagacggaccgcttcttcgtccccgacaacagcaccgcgccgtaagggaggggcccatggagagaaggcgatgcaggtgggtcaacttgaaaaacccccgctatatccgctaccacgacgaggagtgggggaggccccactatgatgacggctatctctttgagctgctggtgctggaatcctttcaggcggggctgtcctgggagtgtatcctgaacaagcgggagagctttcggacagcctttgacggtttcgactgccgcaaagtggccgcctacacccaggagaagatggacgccctggctgccgacccctccatcgtccgcaaccggcggaagatcgctgcggcggtgaacaacgccaggatctttttaacgatccaggaggagttcggcagcttttccaactatctctggcacttcacccggggggagcaggtggtccaccgggacgggctcctccgggcatcgtcgcccctgtccgacgcagtttcccgggacctgaagggaagggggatgagattcgtgggctccgttatcatctactcctacctccaggcggcggggatcatcgacgaccacgagccggagtgcgacttctgctgcggccggcagagggcaaaggagcagcctttggggatagaatagaggccctccggggcaggagggcggaaagaaggcagccccgcatggcacgccatgcggggctgctcaatgctgctcatgtcagttgaactcatggggagagaggtatttctgcgaactcatcgcatagccgttttgatacttgacagtcaggtagacagtctcctccccgttggtgagctgtacataacaaacgccgtcatcgtcgaactgatgggtgatgtccagcttctctccgtaatagtagatccacaccgagccgtcatcctcataggagacctccggcgcgttgagatgctccatcagctcctccggggtgagcggccgttcggtgccgtccggctcaaaggccacaccgcctccgccgcgctgctgtgtctcgccgttttcatctgtgtactccagcgtatagtgccccggctctactgtcatgactgcgtctgtctgatcgccgtggagccaaagctgcaccctgcgctggatgctccccaggtcggccgcataagccgcacttcccgtagccagcaggagtgcggccgcgagggcgatgactgcggtcctgcggccgctctttctatgcgtctgctctgtcattttcattacctccgtcagtgtgtcggagggggcatgcagtggggcaaatgccctctgaaaccgttcctgctctgtcatggtgattcctcctccaaaatcgttttgagttttgcccttgcccggaacagcctggtgctgaccgttttttccgggatacggagcatggatgccacttccgctgtggagtacccctcatagtaaaagagcagcagcggtacacggtatttcttgtccagggacatgacgcttttgaacagctcctggtcccgctcatgctcaaatcccagcatctcggtgtagtcatcgatgttctccagcctgcgccacggtgagcggaagagcatcttacagcgattgacggtggcgcggatgagccagtttttgaggtgggcgtccgattcaaacgccttttctgtcttgtacagctcgatcagtacatcctgcgtcacatcatttgcgtcatccggatttttcagccagccataggccacgcgatagatggtgtccatgtaccgctccgcggttcgggcaaatgcttcgtttgaaaacatatatgtctctccttgaaaggccttacaccctatatgtgcagaaggaagccgattcctttcactttggaacaaaattttttgtcccggctgccgaagctgcgggcaaagcgggacggaagcagcagaagacctccctgcggaacagcagctccagcagggaggtcttgtctcgactctcgtggtcattcttttgtatgcgggcctgcgcaggggagagggccgccgcctcgctatctcagggtgggattgccgccctgcccggtgggaatgtccagcaggatgtccttgttctttcccgcccgcagcacatagctgtctcccgggtggcccatgagcccctcagcgcgccgtcccgcagccctacctcgcaaacggtgatgcgctcaggcagcttcataccatatcacactccaaatcatatcaggcagaatatgttcaaacacggatgcttacaccgaaacagctgtagccgtcactgctcccggggcagctggagcaccgcgccctgatcggcactggtgaccagggccgcgtagcgctccagcgccggggtagccggcttgtggatgtgccggacccgctccaggcggcgctggatctcctcctccgggacacagagggtcagggtgcggttggggatatcgatgatgattctgtcaccctcttccactgcggcgatggggccgccggcggcagcctccggggacacgtggccgatacagggcccccgggtggagccggagaagcgcccgtcggtgaccagggcacagtcctcgtccatcccacggcctacaataagggagcatgtcatgtgcatctcccgcatcccaggaccacccttgggcccctcgtaccggatgaccagcacgtcccccttttggatcttgtcgttggacaccgcccagctggcctcctccatggaggtgaagacccgggcctgcccctcaaagtagtgcatgctgggcttgacccccgcctgtttcaccactgcgcccttgggggccagattgccgtgaagaatagccaggccgccctctggcttcttggggtggtccagggagaagatgacatcgttttccaccagctcaaccccggcgagattttcgcccaccgtctttccactgaccgtcatctgctccaggtccagcttacgctccagggccttcatcaccgcagggaccccgccctgctcctccagtacactgagggggtactgcccggagggcttgatattgcagagataggggatctcccggctcagctcatcaaagtcatccagggtgatgtggatgcccgcctcatgggcgatggcgggcagatgtaaggtgctgttggtggatgctcccatggccatgcttactctgatggcgttgcgcagggcctcccgggtcatgatcttacggggcgtcaggtcctccttcaccatggccacgatccgacggcccgactgcttggcgatgcgccgttttttcgcgctcaccgcgtgggccaggccgcagccgggcaggctcatgcccagggcctcggccagacagctcatggtattggctgtgcccagcatggagcaggtgccaacgccgggcagggcggcctcctcgatcttcatcaactcgtcttcggtgagcctgccggtctgggtgcggccaatcagctcccgcatgtcggtgagagtgatcgcctccatgtccttgtactttccagggagcatgggcccgcccgggatgacgatggcagggatgttcagcctcatggcggccatcagcatgccggggacgatcttgtcgcagccggggagcatcaccatgccgtcgaactgatgggcctcgatcatgtactcggcggagtcggcgatgagttcccggctgggcaggggatagctcatccctttgtgcccctggcagatgccgtcgcagatggcgatggtgctgaactcccgggggatgccccccgcctcgatgatcccctgcttaacgaagtccgccagctcccgcaggtgaaagtggcctggtaccatctcggtgaaagagttgaccactgcgatcatgggtttgcccaggtcctcccggtccagaccggtgctgtacagcagcgcccggtgagccgcccgctcaatcccgttggtcagcatcccgcttcggtaatccttaaagtgcatcttctcctctggcatgttcagcgctcctttcctgtgcggctgttttcatctagcagtgtaccagcggattgacaaaaccgcaaacacattttatatttattttataaacaaaaaagttgtatttagggagggagagcggtgaatatcagtctggaatactttctggccgcggcggaagaggagagcatcagccgggctgcggagcgggtcatggtgagccagcaggatatgagcaaccatatccggcgtctggaaaagcagtacgggctcctgtttgagcggcggcccagatttgccctgaccccagcaggggaggccgtgctggccacctaccggcaggtgcggctgctggaggagagcctggaagaccggctccgggacctgagggaggatacagaggggaccatccgcctggggatgcacatcgcgcgggcgcgcatcctggtccccccggcggcggccagattctgccgggagttcccccacgtgcgcctggaggtggtccacggggacacggccgttctggaagacaagctggggcaggggacgctgcacctgttcctgggtgtagatccggaggagcgtccccacttctgcttcacgccggtgggctcggagacagtctatctcgtgattgccggggccctgctggaccgctgcttccctcaagggggcgcgggggataccattgacgagacgcagctatcgcgcttaccgttgatcttcagcccgaccatcagcaagactcaggcccggatcacagactttttccggcagcacgggctcgccaccgcatttcaaatcacggcgggggactatgacctccagctccggctggcggcccagggcctgggggcctgcttctgcccggctatgcacctgcgggacgtccggcaccttttggagggtccggagcccattcttcggcggctgtatgtcccggatctggacgtgcgtaacgaactgaagctggtgaccaaccggcggatgtatcacccccgctatctggacgtctttgccgggatattggaggaggaggccaggcgcgccctattgtgctgagcgtcccattccaggccggacatgggccaatgggctccaaagccgccccctccgccctgttcgggcggagggggcggctttgggcgttggaagtatgaatagtaaggggaaaagtagaaaaagaaaaaattatatgaagtatatcacaactttacttgtaagtatactcttttaccgttcccttcccaattaacggaacgcctaagttgcttgccggcctcccacgccgcttccagatgttccgggctaaagacccgcttgactcgctcatagtcggcggagcataaaaggaccgcaagtcccgacaaaagagacttgcggttatcatgatttattcccactcggcaaattcagatatagtagggtgtatttgaggtgatttcgcaggaaaaactttcgcaaatatgttaatattccacctgctattttcggctgtaaagtttattagtatcaaaatagtatcacaaaaggctgggaaatacaacagaattatgtggagctctacataattccggcacggacggacgctgtcaggcacagcggataacagccttgcaagaggcgttgtacctgcgctggatatattcttgataggctttctggtctgtcatggaaattccccctctctgaataatagtgcggggcggcagcactccttgctgtcgctccttgactgcctaactgcgaaaccgggcggggctgtcaacggtgggcgaagcccgttcatcttgaccgcccgctggctcggctggctttgctatttacccgacaaacttgaatttattgtaaggtatcacgttttaccttcttaagccttactatcattaccataggaatttctttgttggttttgaaacattcttcataaaatccatcaatgacaaatccagctctaaaacaaaggttaaaaatatcttgtatggaacgatgataataaatctgctctttcggttgcccttcaatcgctatatcatagtaactgtgcggtgtcatatatttttcagtcaacgtgacaaaacaagggtgttgcgttgcaaagacaaaaattccgctttcctgcaacagttcataaacagccataagaagtggttcaatatccgtaatatccataattgccatattagaaactgctttcgtaaaggctcgatttctttttaattctaatatactttttctattggtcgcatccgccacacaaaattcaatttgttttgcatattgtgattgccgtcttttagccaattctatcatttttttgctgtaatcaaaagcgacaaccgaagcgcctctttgtgcaagatacgaagaataatttccattgccacacgcaatatccaaaatataatccgcaggattaggagatagaagttccgttactttgggacgcactacctctctgtgaaattcattagattcgtcacccattgcattatcccaaaattgtgcgttctcctcccagatttttttactttcctctgttcccatgttctctcccactcccaaaatttgcttttttgcttccattaaatcttccttacgatattccattgttaccctccataacttctgattgttgccgtcttgacgattatgtatctttacattaccttctgaaacatatggcgcaccttgtccaggcggttgtttggacggcggggctggatgaccggctggccgacagcggcctgatacccttttagctctgtaaggcatacgctctgcccgttggtgtaaaaggccagatcagtacggtatgcctgtatacagcgggcgggaatctcgccagtaaagacaacttcatccttttttacctgggccgtttcgatggtggcacagtatttcggtgcatcatgataagccctggaaaggtattcctggggcgcatagagggtgaaggagagataaggttccagcagctgcgtccccgattccttcaatgcctgttccaatacaatcggggccaatgagcggaagtccgccggcgtgctgactggactgtaataaagcccgtattcaaagcaaatcttacagtccgttacgttccagccgaacaagccctgctccagcccgtaacggataccatccctgacagcgttttgaaaactctggttcaagtatcccagcgaaacccggctctcgtattgtacgccggagccaagcgggagtggtgtaacagacagtccgatagatgcccaaaacgggttgggcggcacctcgatatggatggtgtggctggctgctttgagcggccgctccatataaatgacggtgggttcctttaccactgtttcaatcttgtatttttccgacagcaaagcggaaacgacctccaactgcacccggcccaaaaaagaaagaatgatctcatgggtgatggaatccacttcgcagcgcaaaagcgggtcagtatccgcaagttgcgtaagagcgtccagcagccgttctctttgcgctgccgttttcggcgcaatcgtcgtccgcagcatggggaggggggcctcgcgccaccttttacgagggagccgggtttgatcccctaatacatcgtttaacctcacgctgtcgctgggaaggataacaatttcgcccggataagcggtgtctgtccgaacaatttcccctttggatggaatacgcatctctgtgattttcagcttttctctcccggccagggccaccgtatcccgcaggcgcagcgttccgctgtatagccgcagatagacacgccgctggccgcaatcggtgtactcaaccttgaaaacgctgccgcatagggtggcgctcccctgttccccaatcggttggaacagtcctgtcaccgcatccatcaacggttgaatgccaaggccctttttggcgctgccatgatagaccggaaacagggaggcttcttgaacccgccgctgttcctcccgcgcaagtttttcctggctgattggttctcctgcgatatacttttccaataatgcatcgttattttcgatgaccgcatcccatgcttctatgtcggtattttcctccaggactatttccggggacagcgacaccgtctgcttgatgataatatcggcggagagcttatcccgaacagactgaaccacgctctgcaaatcaacgccagcctggtcgatcttgttgataaagataacggtgggaatgttcattttccgcagggcatggaacagaatacgggtctgggcctgcacgccatctttcgcggagatcaccaagatggccccatctaaaacagccaaagagcggtacacctccgccaaaaaatccatgtggccgggcgtatccacaatgttaactttacatctgtgccactggaaggaagtgactgccgcttgaatggtaatcccacgctgccgctccaaaaacaaggtgtccgtcctcgttgtccctttttcgacgctccctggttctgaaatggctccactggcatatagcagactctccgtcaaggtcgtctttccagcgtctacatgggcaagaatcccgatattgataatgttcatgtctatcctccatacaaggcccgaatgggcgcaaaaatccccagcggctaatacttttaccgctggggatcatgacttcggacacacagaaacatacacgacttacataagccgcggtccgtcacgatatttactaaaaaggcaaaagtattcttaaaattgggtacaaaaaccaagcccctgcaaggggcaatcatttttgcgcccattatcaaattttatttaagaataccttgccgcatatttgatagactcctcaaatcaggataatagcagtatatcatagtacgctctaaaaaacaagaaatcattttaccgattccacaaataaaatcggagggtattcactggaataccctccggttttggtgattatcgtgcgtctatccgaatttttgactttgcggcccgtttccgttccttttcggcatgttcctgctggtaagctgcctctaatattctgtccacttgttctgggccaaaggcccttttgacccgctcatagtcagcggagacttgccgcatggccttgttttccaacttgacctcctgcaatcgatcagacaggcggatgttgctctccctcacccggccatagtccccttgcagacgctcaaatttcccccgcagctccacataggccagatacagggagcgcagcaccttgacgatttgggccagcaggggctttgcctttttctctcggtaggcccggcctgtttccagcgttcccggctccggcaaaatctcctccggattggcggagaaatccgctgccaaccgctccatatttttcaccgccggggcaagttctttgagccgccgttcctggctctccacctggttttctttctccgccttgaccgtctccagaacggcgatctcctttgcccgctgctctttcttgtagtccagcacagacaagtgcttgtcgtgggtgcctttgtcctcccactcaatcccgtggcgctccatgaccagggaaagctgctccttttccgagcgcacccactggctccactctgtgtcccctctggtgccgccctggaaaccctgggccgctaacgcctgtttcaaagataccctcgtgtccagccctcgcttgctcccggtggtgaatggtacaaagtcaatgtgcagatggggcgtagcctcgtccatgtggaggtgggcagagaacacccggagttgggggttgcgctcttgaaagcccttcatgtactcgtccaaaaccgctgccgcaagctgtccctcctcgctgtcggcgctcatatcatctcgattgcccacttgcaggatgatttcatggaacggcttttcctgcttgccggagcggatcttctcatagtaatcctctatccttctgtcggccctggtttgtttagcgttgtaccgttccagagcctcgtcaaagagttcatggtacaccgccttgatattctcctggcagtaggttatattcaagtgggagcgttccgggtcagtgttcttggcgtggaattttctactgttatggttcaccgatccttggcccaccatggcgctgattgtccttttcaaatcaatccctcctcccttttccgccgcgcaagcggcgagcctttgttactttctgcgaaagtaacgcaaaagcacttttgacagcctgacggccatcaaaagcgcatttgcgccctacggggtggtgtgggggctttgcccccggcaactgcggttgcctcccccagcagggccgccctttgaaaagggcaccctgcaccccgcctaaactttgtcactcgccgttgggcagggtggaaaggccaggggcctttccaccacccggcaagtgttttccgtgggccgaaagtcaaggggtacgggttgtattgacttgcggcaatctccacccgcaggtatgccccccttgactttcgcccccgctccccgtgacagccgtgacgaccgtgacgatgttttacacaccgcctccgcactccgaaaagctgtcacagctgtcacggtcgtcacgcctggggttcctccaacgtgagcttgatactccgcccggcatgggttcgggcgctttcatagtggatgtggtactcataggacagccgccacgcccggacattcagccgcatagccagggcattgggtttcatatccagccccagggcggcgacaagttccgtggccgtccctctccactctggccgttccgccgttaccagggcggcaacagcctccaacaccgggtcaggcggctcctgccgcagctccgtttcccgccgctccagctcccacacaagccgttcctcgtcccgcttgaggtagaggcgctggtcttgctgatcccgcccagaaatgtccagggtggcggcgttgtctgcccgccgctccttttggagcagaaaggccccgtctgccgcacccaataagccgttggtgccggagatcatatcaaacttatcatcggcctgctgcttgcgggtgtgatgtacaaccaggaggcaaaccccgcttatatcggcaaaccgtttcagtttggtgattacctcatagtcgttggcatagctgtacttctctgccccggcctcccggattttttgcagggtgtcgatgataataagccgggtgtccgtgtgttcccggacaaagccctttagctgctcctccaggccaccgccgagctgcttagctccgatggcaaagaacaggtttccggtactctctactccaaacatccggtacaaccgctcctgtaagcgacggtggttgtcctccagggccagatagaggactgtcccctggcgcacctcatacccccacagggaaaggcccatactcacatgataggcaagctgggccatgagaaaggacttgcccaccttgggagcgcccacaaagagatatgtccccgcatagagcagaccgtctaccacaggaggtctgccggggtacacctgttcgtagaggtcattcatagacacggtaggcagataggccgggtcattgacccggcttatctgccgcaggatttcctccaaatctctttccgggggcttgtgttctgtcacgccctctgctatactttggttaggtttttgtgagagcgactgtcccccgtctgcgccaacaggcggatatggggcagtcgttttctcttgcaatctatccatctatcaatcctccctcatgccgtccatgatggcggcgatcagccggatggtgtccagcaactccccatccacgccattcccggcctcgatacgctccagttcttccagaacggcggccagctcgttccgcagggccttatacaccctggggttgccctgtaccaccacatcccggcacagcagccgtcgggtgatgtagtcctgtttggtaaggccggagagccgcacagcggtttcaatttccctgtcctcatccggggacacccggaaagccacagttttgtttctccagcggttgtgtcggtcaagatttttcactgacatgatttaggccccctttcgctccatgtccagtttgtccgccatctccgcctgccgggtggggaacaggtgggcgtagcggtaggtaatatcaatgctttcatgtcccacccggtcagcgattgccagggccgtaaagcccatgtcaatgagcagcgaaatgtgggagtgcctcaggtcgtgtattctgatccgctttaccccggcctctttcgcacccctgtccatctcccggtggaggtaggattttgtcaccgtgaaaatgcggtcggtgggcttcaccccatacaggctcttgatatagtctcgcatttcttcacagaggaaagcgggcatttgaatgacccggttgctcttaggggtcttggggtcggtaatcacatccttgcccttaatccgctggtaggacttggagatggtgacggtctgtttctcaaagtcgaagtcgccaggagtgagggccagcagctccccctcccggacgccgcaccagtagagcatttcaaaggcgtaataggaaaggggcttgtccatcatggcctcggcgaatttcagatactccgcctttgtccagaacagcatttcccgtccctttggctttcccatattgcccgcctgggcagcgggattgacctttagattgtagtgccgtaccgcatggttgaacacggcgctcaactgattgtgcagcgtttttaagtacaccggagagtagggcttgccgttcttgtcccggtaacccagcatttcattctgccaggcgatgacctccttggagtgaatgtcgcacatcttccgcttgccgaagtacggcaccaacttcttgtagaggatatgctctttcgtcccccaggtgttttccttgatacggcctttcatgtccgccacatagacagccacgaagttttcaaaggtcatttccaggtcggcggtctgttgttgcaggaatgtccgctcccactccagagcctcccgcttggtgggaaagccccgtttcattttctttactttcttgcccgtccagtcctcgtagtaaaaggacgcataccatgtgccctttgccttgtctttgtatgccggcattgtggttccctccttattgtctgtcccgcagcccatagaatttttcctcgaagtagcgcctgcttacccgtccgggaatggtgagaaagccttttttcttcagctcctcgttcatctcccgcaccagcttgtaggcgtagggcttggaaatgcccagctccctggcgacctcctctgctctcacaaacagctccttttccatggtcagcacctccttattttagtttcgcaaatatgttaatgtcaccatcttcattatacattaacataagtgttaatgtcaagaatttatttcgcatttttgttaaagattatcttgcatctttcgcttttttgcgctatactattggcaaaggcggtgggatattatgacagtcggagacaagataaagaaaatccgcacctttcgaggcatgacacaaaaggaattggggcttgctatcggctttgaggaaaagggagcggacaaccggatcgcccagtatgagacgaattaccgtgttccgaaacgggaactgctggacaagatggccgaggcgctgcgggtagaccgccagaacttctacaccatcgcccccggctctgccgaggacttcatgcggacattcttctggctggacgaggacagccctggcgctatccgcctgttccaacttgtccgcaatccgggcagagcaggggccgctgatgataccgctgtacggtacaatgatagcgatgactggcccgcacaccctcccgtgggtatgtacttccagtatggccttgtggacgagttcatgcgggaatggctttttcgtcagcaggagttacacgccggggagatcaccagggaagagtattttgaatggaaactcaactggccccatacctgcgacgatggcctggaaagcgaatattatatcccttggcggaaaaataaataagtcaagcaaaaaaaccgccctgctgaatttgtcgttcagcagggcggttttgcttgtccttttgggatttttctcttgagaataccgggcggacacaaatagtatcaatccagtatcaagagcagtatggacgggcaaaaaagcctgtattcatgcgggttttcgccgtttcgagcgtcattcccactcgcaaaatgaaacttaattctaaacgcttttgtttgggagatttgatatcatttgatttttcctgatacctattatccttatcctatgggcttgccgaacttttgctatcatttggctatcaaggaaatggctatcaacggtaaaattagattggtttctctggtggtttacaactacattttaccacgaaagacagggaaatgcaataaccttcctcgctgtggtgtatcaagtgatcttactgaacatatggcgcaccttgtccaggcggctgtttggacggcggggctggatgaccggctgaccgacagcggcctgatatcctttcagctctgtaaggcatacgctccgcccgttggtgtaaaaggccagatcagtacggtatgcctgtatacagcgggcgggaatctcgccagtaaagacaacttcatccttttttacctgggccgtttcgatggtggcacagtatttcggtgcatcatgataagccctggaaaggtattcctggggcgcatagaggatgaaggagagataaggttccagcagctgcgtccccgattccttcaatgcctgttccaatacaatcggggccaatgagcggaagtccgccggcgtgctgaccggactgtaataaagcccgtattcaaagcaaatcttacagtccgttacgttccagccgaacaagccctgctccagcccgtaacggataccatccctgacagcgttttgaaaactctggttcaagtatcccagcgaaacccggctctcgtattgtacaccggagccaagcgagagtggtgtaacagacagtcctatggatgcccaaaacgggttgggcggcacctcgatatggatggtgtggctggctgctttgagcggccgctccatataaatgacggagggttcctttaccactgtttcaagcttgtatttttccgacagcaaagcggaaacaacctccaactgcacccggcccaaaaaagaaagaatgatctcatgggtgatggaatccacttcgcaacgcaaaagcgggtcagtatccgcaagttgcgtaagagcgtccagcagccgttctctttgcgctgccgttttcggcgcaatcgtcgtccgcagcatggggagggggtcctcgcgccaccttttacgagggagccgggtttggtcccctaatacatcgtttaacctcacgctgtcgctgggaaggataacaatttcaccctgataagcggtgtctgtccgaacaatttcccctttggatggaatacgcatctctgtgattttcagcttttctctcccggccagggccaccgtatcccgcaggcgcagcgttccgctgtataaccgtagatagacacgccgctggccgcaatcggtgtactcaaccttgaaaacgctgccgcatagggcggcgcccccctgttccccaatcggttggaacagccctgtcaccgcatccatcaacggttgaatgccaaggccatttttggcgctgccatgatagaccgggaacagggaggcgtcttgaacccgccgctgttcctcctgcgcaagttcttcccggctgattggttctcctgcgatatacttttccaataattcatcgttattttcgatgaccgcatcccatgcttctatgtcggtattttcctccaggactatttccggggacagcgacaccgtctgcttgatgataatatcggcggagagcttatcccgaacagactgatacacgccctgcaaatcaacgccagcctggtcgatcttattgataaagataacggtgggaatgtccattttccgcagggcatggaacagaatacgggtctgggcctgcacaccatctttagcggagatcaccaagatggccccatctaaaacagccaaagagcggtacacctccgccaaaaaatccatgtggccgggcgtatccacaatgttgactttacatctgtgccactggaaggaagtgactgccgcttgaatggtaatcccacgctgccgctccaaaagcatggtgtccgtcctcgttgtccctttttcgacgctccccggttctgaaatggctccgctggcatatagcaggctctccgtcaaggttgtctttccagcgtctacatgggcaagaatcccgatattgataatgttcatgtctatcctccatacaaggcccaaatgggcgcaaaaatccccagcggctaatacttttaccgctggggatcatgacttcggacaaacagaagtatgacggcttacatgagccgctgtccgtcacgatatttactaaaaaggcaaaagtattcttaaattgggtacaaaaactaagcccctgcaaggggcaatcatttttgcgcccattatcaaattttatttaagaataccttgccgcatatttggtagactcctcaaatcaggataatagcagtatatcatagtacactctaaaaaacaagaaattattttacccgattccccaaataaatcaggagggcattcactggaacaccctccgtttttggtgattatcgtgcgcctaatcttgctttttgccttgcgtcccgtttccgttccttttcagcctgttcctgctggtaagcggcctctaatattctgtccgcctgttccgggccaatggcccgcctgacccgctcatagtccctgacctttccctttagactgtccctctcggcgcagacctcgtaaatcctttctgataaggaactatttttgctgacctcccggccatagtccgcttgcagccgctcaaatttggatttgaggtcgcagtaggcccggtagacagaccgcagcaccttgacgatcttcgcccataagggcttggcctttttctcccggtaggccctggccgattccagcggtcccgcttctggcaagacctgttccgggtcgctggaaaattcctccgccagcttctccatgcctttcagcatgtgggccacatcgtttagtttggccttggcctgggccgcttccttttcggcagctgccgcctccctgttccttcggtcaacctcggcctgggccagcacagccgcctcctgaagctgtgcaagccgctcctgttcacacttcaccttgaactgcgtgaccgtcagatgttcctcggaactgccacgctctccacgctccaagtccgtgtagccagcggagcgcatctgctgaaagaaatcatcctgcaagacgctgtacgactttctcagcacaggcttgccctttgctgttcgtaatggctccccggtggcctcgtctactgcgggctgggatgcccactttttgctcatgctgacctgcataacggtttctttgaccttgcccaccagggatttgtccttgcaccgctttgtccatcgtatctccttctccaccaccgggatatagaccacatggaggtggtagtggtacacgtcctctcccagcgcctcggacatagcccggttgcgttcgtcggcgtgcatgaccgccgacaaaatatactgctctccacctacgattttgattgcggatttgtatgcgtcggtgtaaaattgttttgcgaagtcatagccgccgtgattgtagaagtaggcggagttcacatcaaagaccaactcaccgtatcgaaatgcgtccgccttaatgccacgggtggagatcacaccatcggcctccatttgggagaacatctcctgataccctgcggatgggaccttgaaatggacattgagcgacgtccgctctggtacaatgtcctggttgacataggaatccttctcgcgttcgttgtgctgctgggtgttgccgattttagcagcggtcagcctcatatttcttgcgttggtgcggtcaatgccgtcgcctctcgccataggcaaaaatcctcccatttcagatgtttggttgttgaaaatggacgggggttcggggaaggcacttcctgcgggaagtgtaataacccactatgacactttcgccccgttggtgcgaaagtgccgtgggctctccgagggggtgcgggggctttgcccccggcaactgcggttgcctcccccagcagggccgccctttgaaaagggcgccctgcaccccgcctaaacttttccactcgccgttgggcaggtggaaaggcacagcctttccaccacccggcaagtgtcctccgtgggccaaatatcaaggggttcgggttgtattgccttgcggcaatctccacccacaggtatgcccccttgacatttgaccccgctccccgtgacagccgtgacgaccgtgacgatgttttggacaccgcccccgctctcaaaaaagccgtcacagccgtcacggtcgtcacgcttggggaggatccagggtcaggctgatacttctcccggcgtgggtgcgggtgttctcatagcggatatgatagtccgttgccagtttcccggcccggacgttcagccgcatcgccagggcattgggcttcatatccacttgcagggctgccgccaactccgtggccgtaccgccccaggacggcctctccgccgtgataaaggcggctacggcctccagcaccgggtcggggggttctacccacaactccgtttccatccgctccagtgtccatgtcaggtgttccttgtccttaatgagatagagccgctggtcttgctggtcacgtcctaccacatccaaggtggcggtgccgtccgtccgcttctccttctgaagaagaaaggccccgtctgctgcccccgacaggccgttggtgccggagatcatatcaaacttgtcgtcggcctgctgcttccgagtgtgatgtaccagtaggaggcagacgccgcaagcgtcagcaaggcgtttcagctttcctaccacctcataatcgttggcgtagctgtacttatccccgccagcctcccgaatcttctgaagggtgtcaatgataatcagtttggtgtctgggtgttcctgcacgaatcgctttagctgttcctccagcccgttgccgacctgctttgcgcagatggaaaagaggaggtcgttggtgccgtccatgccgaacatccggtaaagccgctcctgcaagcgacggtgatcgtcctccagcgccagatagaggacagtccccttgtgaacgggatagtcccacagggggaggcccatgctgacgtggtaggcaagctgggccatcagaaacgacttgcctaccttgggcgctcccgcaaagaggtacgtccccggatagagcagaccgtcaatgacgggcggtctgctctgatagacgttctcgtacaactcgttcatggaaatcgtggggagatacgccgggtcgttcatgcgctgcattttccgcagcagttccgcataatttttttcagggggattgttttctgtcgtttcctctgttatacttgcggtaggtgtttgtgaaatgggctgttccccgtctgcgccaacagacggaaccgggacagtccttttcgtttctctggaatccatcaatctatcaatcctccttcatgccgcccatgatagcggcgatcatctgaatggtgtccagcagttcatcgtccacgccagccccgtcctcggcccgccgcagttcgtccagaacggcggcaagctggtcacgcagggctttgtagaccttgggattaccctgtaccactacgtcccggcacaggaggcgtcttgtgatgtagtcctgctttgtcaggccggagagccgcacagcggcctcgatctgttcatcttcctccggggacacccggaaggccacggtcttgttcctccagcgatttttgttgtctcggtttttcagtgacatggttacgttcccatcctttcaaagtccagtttgtccgccatctccgtctgccttgtaggaaacagatgggcgtagcggtaggtgatatcgatactctcatgccccacccggtcagcgattgccagggcggtgaagcccatatcaatcagcagggaaatgtgtgaatgtcggaggtcgtgaattctgatccgcttcactcccgccgctttcgcacctctgtccatttcatggtggagatagtgcttgctgacagggaaaatccgttcatttgccccggtgctgtaaaacatctttaagtagtcctccatctctccacagaggaatttgggcatcttaatgacacggttgctctttttcgtcttaggagtggtaatcacgtccttgcccttgagccgctgataggatttgctgatggacactgtacccgcctcaaagtcgaagtctgttggggtgagggccagcagttccccctcccggataccgcaccagtagagcatttcaaaggcatagtaggagaggggcttgtccatcatggcgtcggcaaatttcagatactcttccttcgtccagaacagcatttcacgccgttcctccacccccatgttcccggccttggccgcaggattgacctggaggccgtagtagcggacagcatggttaaagagggcacttaactgattgtggacggttttgagataggtaggggaatagggttttcccttggcgtccgttaaccctcggatcgcgttctgccagtccatcacgtccttggcggtgatttccgacaatttccgttttccaaaatacggcaggattttcttctggatgatgctttcttttgtcagccaggtgttcagtttcagcttgggcttcatatccttctcatagagctgggcgaagctctcaaaggtcatgttcacatcggcctgcttttgcatcagaaactcccgttcccacgcctgggcctctttcttggtggcaaagccacgctttaacttctgctggcgctctcctttccagtccgtatagcggaattggacgtaccaagtgccgttggccttgttcttaaacgccgccataggttaatcactcctttcgctctggcttcttgtgccataaaatttttcgtggaagaatttgcggtcgatgcggcctgaaatggtaatacagcccgtctttttcaactccgcattcatagaacgaatcagcttataggcataggggacagaaacccctaattcctccgctacctcgtccacccgcatgaacatggtgcttgccattgtgcgctcacctcctttcatggccccagaactaagcctttatgcttaacctattataactaagcaaatttgctttgtcaagtggcttgcggaataatttttaacttttttgtttaagatactcttgactgttactaagcgaatatgttatactactttcgacagaaaccaccagataggagttggcatttatggcaataggagagcgcatccattttttccgcaccctccggggtatgacacagaagtatcttggtatggcggtgggctttccagagcgttccgccgatgttcgtctggcacagtacgaaacaggcacccggacgccgaaggccgacttgaccgctgccctggcgcatacattagatgtatcgccccaggcgttgagcgtcccggacatagacaactacataggtttggcccatacgctgttcgccttggaggatgtttacagtctgaaagtggtagaggcggatggacgtgcctgcctgcaagcagatatttttcagggaggccgtcaagccagtgagctgaacaaaatcttgattgcgtggcgggaacaggcggcgaagttggaggccggggagatcaccaaggaggactatgaccgctggcgctacaactacccgaagtacgacaccacccagcggtgggccaaagtcccctcgaaggaattaagcgatgctctgataaaaggattgaagaaacagagaaaagacaaataacaaaaaaggtcttgccgactggtgaaagtcagcaagacctttttcttaggatatggaggatttacccgcaagccacccgttatacgggagtgaacaaagtaaatccggttttggtatctgctatcaatttgctatcaaatgccccgtttccgctttaagaccccagtgttttcaaggctttgcgggttttgtcagttattcccactcgatggtggccgggggtttacttgtgatgtcgtagacgatgcggttgatgccctggacctcattgacgatgcgggtagagatcctgtccagtacgtcgtaggggattcgggcccagtcggcggtcatgaagtcgctggtggtgacggcacggagggccagggtatagtcataggtccggccgtcacccatgacacccaccgaacgggtgttggtgaggacggcaaaatactggttgatggaggcacccaggccggcagcggcgatctcctcccggtaaatggcatcggcgtcccgcaggcggtccagcttgtccttggtcaagtctccgatgacccggatggccaggccgggaccggggaagggctgacgcatcaccagatattccggcagcttcagctcccgacccagctgacggacctcatccttgaacagcagacgcaggggctcgatgatctccttgaagtcaacgtagtcgggcagccctcctacattgtggtggctcttgatgacggcggcatctccggctcccgactcgatcacgtctgggtagatggtgccttggaccaggtaatccacccggccgatcttcttggcctcctcctcaaagacccggatgaactcctcgccgatgatcttccgcttgtgctccggctcagataccccggccagcttgatgaggaagcgctgctccgcgtccacgcggacgaagttgatgtcccacttggagaaggcggcctccacctcgtctccctcatttttccgcatgaggccgtggtccacaaacacgcaggtgagctgactgcccaccgcctcggccagcagggccgcggctacggaggagtccactccgccggacagggccagcagcactttcccgccgccgatcttctcccggatctgagcaatggcggtccggcagtagtcctccatagtccagtcgcccttggcgcggcacacctcatagaggaagttgtggatcatgtcgatgccgtgctgggtgtggttgacctcggggtggaactggaccccatagaagccccgggcctcgtccgcaatggccacattggggcagctgtcgctgtgggcggtgagagcgaagccgtcaggcaccttggccatgtagtccccgtggctcatccaggagataccctcctgaggcaggcccttgaagaggggagaggtggtgtcgtagtaggtctgggtcttgccgtattcccgagcggaatcgtcctgggcctcggtgacctggccgcccagggtgtgggccatgagctggcagccgtagcagatgcccaggatgggcactccccaggtgaagatctccgggtccacgtggggggaggaatccagatacacactgttggggccgccggtgaagatgatgccgatggggtccatggctttcagttgggaaaggggcgtggtgcagggcatgacctcgcagtacacattgcactcccggacccggcgggcgatcagctgattgtactggccgccgaagtccagaacaatgacggtctgatgggacatagactcatcctttcttcagtgagtagattttacagaaatttcaccaaacttcccttgtatccccgggaaaagaggagtatgctgaaggcagacagagggaaaggagatgatcatatgatgcaattccaggaaaacagccggatcgacctggaggacctgctctacgacggacaggagcctgcggtcagcgagcggtaaagggggccccctgcaaggaaccacaccactttggtgtgggttttttgttttcagcagacagacctatgatatatccggacagaaaaacaggctgtcctgtatctgaaattctgccgcagaaaatccggcatcctgatatgtatcggttttacggtcatagatgtggtaatgaaatacgatgcggtaacggccatccggaaagccgcctccgtaatgctggggcagctgggatatggaggtccggccgcccggttctaaagtgtaggactctgcggtgacaccgtagttcaaatctgttttccacggaacgccataccacagaccatccaaaaggacttctagacccgcgctgccggaattcccgtgtaaaagggcgtcattgctttgattggagacgctccattccagcgtatggcccgcaggggaagagagaatcatggggacgtctgctctgggcgtccccagggaaccctccggcaaaaaccggcagtcccactgacctgacagaagggcaagctcacgaaggcaggggagagaggacatgccctccctggtatgggtgtcaacagaaagctgctcccaaagagaggaaaggtccaaatcagtggagaggacccggccgctgttatcgatccagagaccatcccatacaacggcatcaaagtctttgcggacaccagcgacagagagaccatacacgggctgggaagcatcagcatgctgctgaagctgagcgggccgagccccggctgtcaagagtgtaaaatgaaatttcagcatgtcctgccatgtatagatcaatttctgctgggtcgtttcaccgttgtaggcagtaagagtgacactctggccgggccaaataaagggaagcgcgaaaaaatgcctccaaatcagaagactggccagcaggagcaagacgattgcggaacgaaaccggcgcgcagactgaaagaacttcatggcaggcacctccgtttttgtgttctgtcttatgagacgatccaaaaacaaaaaagttccataggaggcggggaggtccgtcagggcatctccccgggcccaaacgggcccggggagatgatggtcagatctgcgtgatgtcgatgggagtaagatcctcgctgcggctctgctgacggacagtgaggatggcccgggcggtgtcgatggcggtgatgcagcccacggagtgctccaccgcagagcggcggatgcggaagccgtcggtgtcgtgcttgcggcccttggtgggagtgttgatgatcaggtccacggtgccggaggcgatcatatccagaatgttggggtgggcctgagagacgcggttgacccgcttgcactcgatgcccgcctcctggagcacgtcgcaggtgccggaggtggcaaagagctcgatgcccatctcctcaaagccccgggcgatgcccacgatctcctgtttgtcctcgtccttgacagtgatgatgatacggccgccacgcttgggcgccttcagaccggcccccttgaaggccttcagcagggcctgagggaaggtctcggccaggcccagcacctcgccggtggacttcatctccgggcccaggccggtgtccacgtcagtgagcttttcaaaggagaaaaccggggctttgacggcgtagtagtcggcttccctgtagatgccggtgccgtactccaggtccttcagcttctggcccagcatcactttagtggccagatcgatgatgggcacgccggtgaccttggagatataggggatggtgcgggaggagcggggattgacctcgataacatagatgtcgtcgttatagaggatgtactgggcgttgatcagtccaatgacgcccaagtgcttggccatgttcttggtgtgcttcaggatcagctcccgatgcttgtcctccaggtggagggggggatagaccgcgatggagtcgccggagtggacgccggcccgctccacatgctccatgatgccggggatgaggatgtcctccccatcgaacacgccgtccacctccagctcccggcccataaggtacttgtcgatgaggatgggatgctcctgaacggtcaggttgatgatccgcatgaactcctcgatgttccggtcggagtaggcgatctccataccctgcccgcccagtacgtaggagggccggaccagcacggggtagcccagctcattggccgcctgaagggcctcctgggtggtaaagacggtgcggcccttggcccgggggatggcgcacttctccaaaatctcgtcaaaacgctcccggtcctcggcggcgtccacgccgtcggcagaggtgcccaggatctgcacccccatctcagtcagcgccttggccagcttgatggcggtctgtccgccgaactggaccacggcgccccagggcttctccagctccacgatgttctgcacatcctcggcggtcagcggctcgaagtacagcttgtccgccacatcgaagtcagtggagacggtctcggggttgttgttgatgatgatggtctcatagcccatgcggcggaaggcccacacagagtggacagagcagtagtcgaattcgatgccctggccgatgcggatggggccggagcccagcaccagcaccttcttcttgccggagccgttgtccaccgcctcgttctctccgtcataggtggagtagtaatagggggtctcggcgtcgaactcggcggcgcaggtgtccaccatcttgaaggaggggatgatgccgtaccgctcccgcagggccttcacctgggcctgggtcatgccgcacaaggtgccgatatagctgtcggcgaagcacatctccttggcccgcttcagggtgtccatatcgggctcacccttgcagcgggacagctcgttctccatgtcgatgatccgctggaagccgtccaggaaccagatgtccattttggtgatgtggttgatcttctggggggagaagccgcggcgcagggcctcggccaccacaaagagacgctcgtcggtgacctggaccagcaggtcctcgatctcgtcggtgtacaggccctccagcttgtccagcttcagggcccgcacgttcagctccagggagcggatggccttcatcagcgcgccctcgaaggagttggcgatggccatgacctcgccggtggccttcatctgagtgcccagggtacggctggcggtggtgaacttgtcaaagggcaggcgggggatcttcagcacgcagtagtcgatggtgggctcgaaacaggcggtggtcttgccggtcaccgcgttggggatctcgtccagggtgtagcccaaggccaccttggcggccaccttggcgatggggtagccagtggccttggaggccagggcagaagagcgggacacacggggattgacctcgatgactgcatactcgaaggagtccgggttcagggcgaactgcacgttgcagccgccctcgatctccagggcggagatgatgtccagggcggcggagcggagcatctggaactcccggttggccagggtctgggtgggggccaccacgatggagtcgccggtgtggacgcccacgggatcgatgttctccatggagcagatggtgatgacgttgccggcggagtcccgcatgacctcgaactcgatctccttccagccggcgatgcaccgctcgatgagcacctcgtggacccgggacaggttcaggccgcggtcgcagatctcccgcagggagacctcgtcgtaggcgatgccgccgccggtgccgcccagggtataggcggggcggacgatcacagggtagccgatctcgttggtgaaggagacggcatcctccacggtgttgaccaccttggaggtgacgcagggctggccgatggactccatgcagtccttgaagccctggcggtcctccgccttgtggatggaggcggggctagtgcccagcaggcgcacgccgtacttctccagggtgccgttctcatacagcgccatggccagattcaggccggtctggccgcccatgttgggcagaagggcgtcagggcgctccttctcaatgatctgagtgatggagggcaggttcatgggctcgatatagacgtggtcggcgatgtccttgtccgtcataatggtggcggggttggagttgatcaggacgacctccaggccctcctccttcagcgcgcggcaggcctgggtgccggcatagtcgaattcggcggcctggccgatgacgatggggccggaacccagcaccaggaccttcttgatatcggtgtacttcggcattacttggcacctcccatggagtcgataaagcggttgaagaggtattccgtatccttggggccggcgttggcctcgggatggaactgagtggtaaagcagttggggcgcttgtacttcagtccctcgcaggtgccgtcgttgacgttgatgtgggatacctcggccacggcagggtccaccgtgtcagagaggaccatatagccgtggttctggctggtgatgaacacacgttccttctccaggtcacggacggggtggttgccgccccggtggccataggccagccggcctgtcttggcgccggtggccagggccagaagctggtggcccatgcacacgccgaagatggggatggtgctgtcatagagcttgcgcagctctgcgatgatctcagtgttctcagcgggatcgccggggccgttggagagcatcacgccgtcaaagccgctggagagcacctcgctggcgggggtgtaggcgggcagggccacgaccttacagccgcggcggcgcaggcactcgatgatgttctgcttcacgccgtagtccatcacggccaccaggtgcgtttcctcgccataggcgtcaaacacctcgggctcggtccgggtcaccctgcggatggtatctttcacctcataggagcgcagccgctccatgacctcggccacattaaaatgctccgcacaggtgagcataccgttcatgctcccctgactgcggagtattttcgtcagtgcccgggtatccacgccctggatgccggtaatgtcgtattgtttcagatagctgtccagtgtgtcctcacagcggaaattactcccctggggagacagatggcggacaacaagggcctccacccaagggcggcgggactcgttgtcctcgtggttgacgccgtaattgccaatgaggggataggacatcaccacgccctgtccagcataggaggggtcggtcaggatctcctgatagccggtcatggaggtgttgaacaccatctcacagatccggtcggaggtgccgccgatgctggtcccggaaaaaacgcttccgttggccaggatcaaagtcgctttcatcaattctctcacacgccttccgttccaggttctcatacgcattgcttcaggagggcatgaccctccagtttgcttcttaatattttatcggaaaacgacccgcaatgcaagatgtcgtttctccttttttcgaaaaaaaacaccggcggcttttggagaaaacgcaccgaagaattaaagaataatagggccggagaagggcaagaatgagagggatggaacgaagcgcccggcgggccgggggcggacaggaggaagccatgttcaccgcgctgatccgtaccgtgatcctatacatcctcatcatcgccggggtgcggctgatgggcaagcgccaggtgggggagctggagccctcggagctggtgctctccctgctcatcgcggacctggcctcggtgcccatgcaggacctgggcatccccctccatgccggggtggtgcccatcctggccctgctgtccctgaccatgatcctctcggtgctgaccatgaagagcatccgcttccgcaccctgatgtgcggccggcccagcatcgtggttcgggacggaaaagtggaccagggggagatgcgccgcaaccggctgacggtggatgagcttctggaggagctgcgggggcagggctacaccgatctggctggggtgaaatacggcatcctggagaccaacggccggctgtccgtcctgccctacgccgagcagaggccggccaccgcccggcagctggggctggagagccgggagactgggctgcccgtggtcatcatcagcgacgggcgcattttgcaggacaacctgaagcggcgggggctggacctgtcctggctggacaagcagctggcggagcacgggtatcccgacttccgggacgtgttcctgctgacagtggacgaggccgggggcgtgtatttcgtccccagggagggaaagtaggggatgggagagatgaagcgcctttgggcggcggtgagcatcctggccgctctgctggccgccgccctgggtaccggctggtgggtggacggactgactgcagattatgtttcccggctggagcaggcccaggccatgagtgagaggggcgactgggagcgggctgcccaggtgacgggaggggtgtaccggaactggcaggagaggagcttctggctccatgccctgctgcgacacagcgacacggaccaggtgctgctcctgttccgctcggtggaagagtacctgaagctggaagagatggaccagtacgcagccgccaacgcccagctcatcgcccagctggagctgctggcggagatggaggacccctctctggaaaatgtgctgtaagagaggaccggcccggacatggcatccatgtccgggccggtctctttgcatgacgtgaagacaagggggcgcttctcacgatttttacgaccgtgccctgcccctgcgggcatagagggcgtaaaatccagcgcccagggccgcggtgacggcttcggtgaggggaaaggccagccagacgcccgtcatgccccagcaggcggccagcaggaaggccatggggaggatcaggaggaaaccccgcagcagggaggtgatatgggcaggcagggcccgctccaccgaggtgaaatacatggacaggatgatgttgaacccggcaaagagcgcgccggtgaaatagagccgcaggccctcttcggcgatctgctggagccgggggtccccctcactgttgaagatcagggccaccggtccggcaaagaggaacagcaggaggtagagggcggcggacaggaccaggagggtgatcagggcatagcgcaggtactggcggatcagaccgggacggtcctggccgtgggcggtgctcaccagaggctggatgccctgagagatgccggtgtacacggcggtgaccaccagggagatgttggcgatgacgccgtaggccgccactcccgtgttgccctccagacccaggatgatgctgttgaaggcgatcatgaccacggcggaggacaactgggccagcagggagggcaggcccagggagagggcagaggctgtggggccgggggagagagggccggggaccaggcgcagatctccctttttgcggatacagtgaggaagcaggatgaggatgcccagcacgggggacatcccggtggccagcaccgcaccgaagatgcccatccccatggggaaaataaagatgtagtccagcacgatgttggccaggctgcctgctgcagtggccagcatggacagccgggggtccccgtcgttgcggacgaagcagagcagcacgtcgttgacgagggtggcgggggcgaagaggagcagcacctggagataggtccgggtcatctcaaacacagcttggtcggcccccagaaggacggtgatcccatgggagcagaacaggcccagcaggaggaaggggatggagaagaggacggacagaagaagcatgccggtgaacatcctggaagcgccgccggggtccccccggctctgatgaatggagtatttggtggccccgcccatccccagcatcaggccggtgccgtggatgaagttgtagatggggatggccagattcagggcggccagcccggcagtgcccaggccctgggccacgaagaaagtgtcggccaggatgtagcaggacaccgcgatcatgccgcaggagctgagggcggagtagcggacaaactcccgcagaggagtggactgtgacatattctgcacctctttcagtaaggtccagccccggccgcgccagggcaaagaaaaagcgttgtgatcccgtatcttacaaaggcctaacgatacaggaaaacaacgcatggggcccacccggcggtggagcgtctatccaatttgtacacttaagataccagaagagggcgggaatgtcaaggcccttccaggaggagaagagagctggcgggtttggtctggaccgatcccgccggaggagtcaggcgcggggggatggggcggtctgcccatctgggcagggcgggccggagaaagaaaacagggctgcctacgggataacagacaaatcgcaggcgggggcgaaggtgtgcaccggctcctccccccgcagcaggcgcaggccgcccagggccagggcctccatctcattttcccccgggatgaccaccacccgggccaggttgtggaggtagccgatgaccatgtcggtgagcatcttggaataggccagcccgccggtgaggatcactgcgtcgatcagttcggtgaagcagcccagcagggtgccaacccccttggcgatctggagggcctgggccttgtacaccagggcggcccgctcgtctcccgcctggatgcgcctctcgatctcccggcagtcgtgggtgcccagcagggcggacatgcccccctcgccccgcagctttttcagcatctccgccttggtgtatttgccggagtagcacaggtccaccacatagagggtgttggtgcttcccgagcggtcgggggagaaggggccggcgtcatcggataccgagtcgatgattcggccgtggctgtgggcactgatactgatgccgccccccagatgggccaccaccagattcatgtccttataggccagcccccggctctcggcgtacttgtgggcggtggcccgggcgttgagcacatggcagaagctggtgcgggtgacccccttgaagccggtgatccgggcctcgggcagcagctcgtcgctggtgacggcgtcatagatgtaggcggggatgcccaggggccgggcgaaggccagggccatcacgcctcccaggtttgaggcgtgctcaaagaccggatagtggagcaggcagtccaccagggcgtcgttcacctggtagcccccggccacgatgttgggcaggatgccgcctcggcccaccacggcggtgagggtggacaggtccacccgctcctgggccagcaggccccggaccagggccacccggtagtccagctggtcgttgagggtggggaagggggcaaggtcctgattggagtggggaatgctccgggaaaagagaggccgggtgccgtcatacaccgccgccttggtgctggtggagccggggttcaggataagcagccgttccggcatgagaaacgcctcctttttggcaggatcaccgccgggacatggcggcgcagatgaggatggagttatatttctcctcccaggaagccccccgggagttgagggcgatgggcaccgaggcgcccagcaccacaccggccatcttcccgccggccagcccatagagggccttgcccagcagattgccggcggcgatggaggggacgagaaggatgtccgcgtcccccgccaccgggctgcagtagcccttgaggcgggccgcctcagcactggtggccagatccagagagatggggccctccactaggcaggggccgaagtctccccgctccccctcctcccggagggcggcggcgtctccggtctcgggcatgcgggggctcaccgtctccgcagcacacagcgccgccgccttgggcctctcataccccagaaagcggcacagtgacagggcgttgcggaggatggcccgcttctcctccaggccgggagcgacgaccagcccgccgtcggtgatgtagagcagcttgtggtaggcggggacctccagaatggccacatgggagagcagcccctccccgcggatgccgtcggcacggtctactacagcccccagcagggcacccgtggacagacggcccttgatgagcagactgccccgcccctggcggaccagggccacggcccgggcggcgcactccgcctctgttccggcggggaccaggtcctcctccgggaccgaagcgcccagacggtccagcagggggcggagctggtccgggggccccaccaggatggggtggatcaggccgtcccgccgggcggccagcacggcctggagggtgtgctcatcctgggcggcggccaccacggcggaccggggaccggactgatggagctgctgccggagctgggcaaaggatgaaagcatggaaaaaaccctcctttttcggatagtttaccacggaagaggaaaaatgtacatcatttttctctgggaggcctgggcggaggatagggggaaacaaagaccgcccgcccccccatcggggaggcgggcggtggatcaggcggtcagttcatcctcggttctgggcctccaccaggcggacgccgcaatactgctcccgcagcttgggcttttcaatcttgccggtggcgttacgggggacgggggcgaagatgatcttccgggggcgcttgtaccggggcaggtcagtgcagaactggttgatctcgctctctgtgcaggtcatgccctctttgatctggatgatggcggcggcgatctcccccaaccgcttgtcgggcaggccgatgacggccacgtcgtggaccttggggtaggcggccaggaagtcctcgatctgcaccgggtacaggttctcgccgccggagatgatgacgtcctttttccggtccactaagaagtagaagccgtcctcatcctgcttggccatgtcgccggtgtggagccagccgtccttgagcacctcggcggtggcctccggattgtggtagtagcacaccatgacgccggggcccttcacacacagctcccccacctggccgaaggggacgggctggtcgttctcgtcggtgatcttcaccttccagccgcagccggggacgccgatggcccccaccttatggagattgcccaggcccaggtggacgcagcccggtccggtggactcggacaggccgtagttggtgtcgtactggtgatgggggaaatagctcatccagtgcttgatgagggaggggggcaccggctgggcgccgatgtgcatcagccgccactgggacaggcggtagtcctccagcttcagctcaccacggtccagggaggccaaaatgtcctggcaccagggcaccagcagccagacgatggtgcagccctcgttggagacggcatcgaagatggccttgggggagttgcccttgagcaggacggcccggctgccggtgaacagggagccgaaccagtgcatcttggcgccggtgtggtacaggggcgggatgcagaggaatacgtcctcgtgacaggtctcgtggtggacggcctccatccgagcggactggagcagggcctggtgcttgaggaggatggccttggggaagccggtggtgccggaggagtagtagatggccgcgtcatcctcatcctggatgagcaccttagggggctcactggagcagttggcggtggcggtgtggtagtcctcggcaaaggaggggcagttctctcccacaaagaagagcaggcggccccgggacagggagggcgccacgtcctccacccggccgatgaactccgggccgaagaggagcacatccacgtcggccagctggacgcagtactcgatctcctgggcagtgtagcggaagttcagagggacggcgatggctccggccttcagaatgccgaaatagatgggcagccactccaggcagttcatcagcaggatagccaccttgtcccccttcttcaccccgcgggagaggagcatgttggccacccggttggccttctcgtcgaagacgccccaggtgatctcccggcggtaggggacggtggatgcgggctcgatgagctcatattccttccacgtgacccggtgcttttcctggatctccgggttgatctccaccagggcggtctcgccgccgtagagcttgtgattgcgctccagcaggtcggtaatgggcatttgcctcggtcctttccaaaaggcggcggtgccgcctgacttcattggttttactcgttaaagtatcatagcgaattttttcccgaatgtcaagaggaaaggtcctttctttcccaaaccgcgccttgtaatattaaatgcgaaagaacaaacaccacgtcgaacgacgggtgaaagttctatcgcatttatttttttaccataacagagccggaaatacaagggaggaaccgacatgacgcacgtttcttttgaagagtacgaggccgcgaaagcggaaatcatcggtggagttcattacaaagaaaaatccacattggaggggaacgtgatccgaaagacctatgcaacggaagagaatgggacgttctacgaggtgaacgacggcgggcgcatcgagttttggagcgacaagcacccggatagccggatttacgacgaaaacgagcgggcggacctcccggagaatgtgggggcagttcccggatatggtgacttgctggccgagaaaatcagggaaacggcggatttcgcaaatctgaaaccgtttgaaaaattcgtgctggataacggatatttgtacgattcgagcgacgcgctaaaagctggctatgaccgggcgtggaaagcacaacacggaatcaccctgacagaagaagagtttgcggcggaggttatgagccgcgggaagctggttgacgcgtcggggctttacgaggcggtcatggaacacgtgaacgcggggcggctgactgcgggcgacgttatgcagtacgcgcattacagatggtgcgtgaatagaccggaagcggttattgcgtatcaagtgggccgcgagaaatgggaggtcaataactgttccgaagagatcaccgaagaggccgcgcggattgaagtttgcgaggaattcgggttcgaggcaagccgggtaaaaatcatcgggaccccgtactatgacgcgacggactggaacttcatccgctttaactgttcggggcgggcgtggctgatgaaaaacggcgagatttatcaagtttacgaatgaaaggccgtgggcgcggtgtaccacaaccgcgcccacgggaagcagaaacagaacgggggtgaaatgtggtgcggcagtacagatacatagactttcgggaccgagagcagatcgccgcccgatacctgaacggggaccgcgtggccgacattgccgcagggcttggcgtgacaacggcaacggtctaccgcgaattgaagcgcggcgaaacgggagaacttgaccgcaaccagcggcgggaatacaaccccgttcttgcacaacagagagttcaggagaatttcaagcggcgcgggaagcccgccgcggcgaatgctaaagggggcgtgcgagttggcaactaattttgaagcgatcaccaaaaacccggagacgctggccgcgttcttgcgggccttgccgattttggaagggccgtgggacgaagaattccagcggaactattgcgccgggtgcggaaaggtcagttgtgacgatggaagcccttgtccttatgaggacaaacggaatagtccgggctggtggttagggcttgaagctatggaggcggaggcggaaccatgaagaaaaaggactatcccggcggcgtgaagctgaccttgaaaaccgcccgcgccgtggcaatgcaggaattcgggaccgcaaagggcctgacaaaagaagaaaccgcaatgcccggctacttcaaaatgaggttggggaacctgttcattcgcattcacccggacacctacgacggaacagggtgcattgtggtttcggctgaactggcgttcgccacggggcaaaccctgaaattcctgaacccggacaccctgcaagacgattacgacgcgttggaacggcattgcaagcgcgcccagcgggacgatctgaaagattgggtgctaaccaacggggcggactactgttgcgaagaagtcaagcggatttgggaaagagggtgacggcgtgaaaatccgaatcacccgcgatacaaaaattccgcttgttgagaaaggccggattttctacgtgcaaggggtatcgacgaccggggacggcgaaacagtctatttcatccaccacggcgggaactatttgggaatccgcgccggggattgtgaagtgatcgagagggaaccggaatgaagaacgtagcgcgagaggccacaaacggcgtgatttacggagaatccggcgagatcgtgaaaaatggcttgcgtgttgtttgtccccgttgcggagaaatcggactttaccccggccacggcggaagtgtgaatatctggaccgtgggggcaatcgagcggcgggaatgtacgaaatgccgtaagcagttccacgcaatcagtttgaccgttccggcggacatgaccccggaggaattctatttgaaaatcaaagagggggtgaagctgtgaagcgtcaattctgcttgccctgctttctcgaactgaaaaaggccgggaagcacgacataacacgcatagcaggcggaaagaacctgaaaatcacctgttggcggtgcaaacgccgccgctacggggcggaatacgagatttcccggaaaggcggtgcgcgccgtgacagtgaatgaattgaagcgggcttttctggatgaacgcccggttgcgttcggcggtatcacctatcagaaaataacggcggtgatttaccgaaagaccccggacgggaaaggtcttcacgtgcaaggcgaactgctggaccggaacgggcgcgccgttgcaatcgcggcggcggaccgaatcacgttgccaaaaggagcgggagaagatgaccccggaagaaccgaacgaacgggttaaaagtctgatcgcagacatggagaaaatcggagcgcgcccggcgtacctgcggggcggaagttacaacgactatttggagtacggcagattgaaagacctgattgctaaagagtgcatagaagcattcaaggccgggttcagattcgagaaagaggcgacaccatgacgcaggaaatcagaacaatcaccattggagcgggacaagcccgcccgcggcggcggagccagaagcacacccggcggcgcgttcggctgaacggctggaccgtggcgaaatatgcggccctgaccgtggccggggtcctgctgtttcgagcgggtgcggcctacgccctgacagaacggggatataaggcgatcggcggcgaagttttcgccctcttcctccccgtgttctactacacaatttccgcaacggtgcgggactatatcaaggaaatcaaatctatttttcgggaggaaaaggaccatgaaaaaacttgctgaactgaaaccgggcgatcgcttcatgtatggcggcgttgagtgggtcaaattcgaggacatcggcgcgggaacgctttgtctggcggcggagcctgtttttcgccgggcgttcgatgaagagaactgcaacgactggcggaaatcctctttgcgccgtgaactgaacggggcgttccttgacgcattggttgcggagggcgcagaccgggccgcgttccttgattgggaaagcgacctgaccgccgacgacggaatgaccgattacggaaccgccgtggacaagatcgccttgcggtccgacgcgctgtgccggaagtatcgggacatcaccccgcccgtggacgcgtggtgctggaacctgaccccgtggacgtgtgacccggaatataacgcttgcgtccgcggcgtcctttcctccggcgcgttgatctgggacaacgcgtactacggcaacaggggcgcgcgcccgctttgctatccgaaatctgtaatcttggtatctatccccggagaggacgacgaagaagagcaggccgcgcgccgtgaagaaatgaagctggaagccgtggacgcgctcatgtccacgctgaacgattatccgccctatttgtggggcgacgcgctgggcgcggtagttgccgccctgttccggtcaaagcaggacgcggaagagatcgcgcaggaagaggcagacaaaaaggcggtggagggttgaccccctccccgccgccgcaaaaagtacataagaaaaaccgccccgcgttgttctgcaaagcaacgcgaagcggattccgccgatgaaaatatatcatctatcaacctaacgaaagtatagcaaaaagcggcggaaaagtcaagaaacaacgccgtttttatgcggcgtagcgggcttgtaatgggtattatcattccgacgaagccttgttacgcagacaggaagaaagcacgggttcagcggtcccgctccacgtcctcttccctcttcacattctctttttgcgccgccgagggtaaagggggattgcaaagggggaagagggagggggcgcaggataggaaccctcttccccctttgcgccctgacggggagcagaccggaaagacaggacacgcccgcttcatcatccacagaaagagggtgaagcaaagtgcgaacatttatcagagaaaagaaaatctattgcggaaagagctaccgggaagttgacatattccagtacacagacgcacagtacagagccacaaggcggacccgctcgaagaaagtgcgagaatcggagccaaagcaaaagaacctgaacgacataaacgcccggcggtattttatccagcttggaaacctgaatttcggggacgacccggacgcgcttcatgtatcggctacatacagcccgaaatatcttccggccacggtggaggacgcggagcgggaggcgacaaattacctccgccggatttcataccgcagggagaaagagggattgccgccgctgaaatacctgctgatcacgtcatacaccaccaaacgaaacagcgacacccccgttcgtattcatcaccatatcgttatgaacggcgggttggaccgcgacacggtggaagagttgtggaggaaacggaaacgcaagggccagaagaagggtgatcgaatcggcttttgcaacgctgaccgcctgcaagccgatgaaaacggcatagcggccctttgtgtctaccttgtaaagcagagcggcgggaagaagcggtggacttcctcgcagaaccttgaacgccccaccagtcggacgaacgacgggaagtacaatcggcggcagatcgagaagtgggcgcgggagcgtccggggcgggagttttgggaaaagaaatatcccggctggaccctgacggacgaagattacgggattgagtacaaatacaacgacttcacgggttggtcaatatacctgaaattgaggaagaaagaatagaaaggagtggtcaacatgggaacgccttaccgggaatgcccgaattgcggggcgcatttggacgcgggcgaactatgcgattgcaggcggtccgagcgggagccgcgccgcccggagcaagagccaaggaagcctatgcgccttatggcgatttgccgcgaaattgacaaggacacgggaagaattgccgtctatcccctgcaaatggagattgacgaccggattttgggagccttgaaagttcgggcaacgatgaacccggaattgcggtatttcgtccttgtgtcggcgcgctgggaaaagtacgggaccgtgactgcgggaattctgaaacgccggagcgtcacgcgggcagacgtggacaacatcggcggaattgtggagttgtgaagcggggtgcgctatgcggataggacttcacgacgcggaacaggagtacatgaagcacaagacctttccgaactatgccttgatgaagatttcggcataccacaaagcccgcggggatttcgtcgaatggtggtcccctatgtgccattatgaccgggtgtattcaagcaaagtctttgacttcacgccggaaaacctgtacttgccgccggacacaatacgcggcgggaccgggtatgacgacataccgataaaccaacagttgccgccggagatcgacgcggcctttcctgattacagcatttacccggaatgcgactacgcgatagggtatttgacccgcggttgcccgaatcattgcccgtggtgcgtggtcccggaaaaagagggtgaaataaagccgtacagggaatggaaacaggttgtgcgaccggacacgaacaaacttgtcctgatggacaacaacattcttgcttccgaatacggaatttcccagcttgaaagcatgatcgggagcgggtacgcgatagacctaaatcaaggcatggacgcacggttggtcaatgaccgcatagcgggcatactggcgcggctgacgtggattcgattcattcggttttcgtgcgaccagataccgcagattgaagcaatcgagcgggcggcggaactgctggggaaccacgggaagaagccgtataacctgtttatttacctgcttgtcacggaggacgtggaaaacgcggcctaccgggtggaacggctgaaacgcctaaagggtatcagcatatacgcccagccggagcggaacgagagaaaaggaatcataccaaacgcgcttcaaaaggaattcgcacagcggttcatttacgggcggtcatacctgaaagaaagctggggcgaatacttggagcgtcacaaagaacggaggttgcatgaatggagcgcgacaacctgatagaacaggcgcaggcattgaacgccgcagttgccgttatcaaagaatattgcgacggcaggacggcggacgacgcttgccgaaagtgcctgttccgcgataattgcggcggggagccgtacacatgggggaatgttgcgaagagtgctaccggacagagccgttcccctgtccagaccatgacgaacgggagcgggagaaaacggagggataaacgatgcagatagatcaccagcgcgcggccttgcgctaccaaaataaggtcaacaacgcgcaggggcattttttcgagcaggccataaaagccgcgtgcgcgttgtatgcgtcccacgggcgggcgacggcggacaaaacgcctgaaccattccgcgtgttggagaagagccgcgacgggattttcaaagggcggttcacggcccgcgcacagccggactttcaggggacgcttgcgggcggacggtcaatcgtctttgaagcaaagtacaccaccacggaacgcctgaaatgggacgttctgacgcaggaacagcgggacgcgctggaacatcaccacaagcacggcgcgatctccgccgtgtgcgccggaatcgggaatgactttttctttgtaccgtgggaagtctggcgggacatgaaagagcggttcggcagaaaatacgtcaccgcggcggacctcgaaccgtggcgggtccgattcaacggagcggttctatttctcgactacgcgcacgaaaggagcgggagcaatgaagaaacagcacagacagaaactaacggttcgggtaacaccgcagaccgcctataacctcgaacggcttatgaccatgagcgggcagaaaacgccgggccgcgttgttgacaagctggttcgtgaaaaaatgctggccctacggggccacaccggagaagtggagagaaaccgatgaacgcaggaattttgcttatgatcgcctattgggtgatcttcacggtgcgaaagcacttcacgccgaaactggccgcggctacaaaggcgaatacatacgacttgaaccgcggggacccggaggcgaagcgggccgcacagcgcaggcgtggcccgctgattgcggcgaagttggccttgcgcgcggcggattgggcggaaaccgcccttgtggttcttctggccgcgtggcttttcttcctgatcggcgcggtgctaacgggaacccttgtcgtgttcggttatccggtataggtggcgcgctatgaaactgaaagcgtgcgaacggtgcgggaagcggacggcggagggattgacgctttgcccggactgcatgaaagaatccggcgcggcggcggaggccgtggccgcggcggaggaattgcgggacattgcgcgggtgctttccgtcacggcaggcacagacacgaatattcgggaagcaatgacaggaattttgagcatagccgacagattggaaggtggaaagagcaaatgaagatagaaaggcaatgggcaatgcctaataaatggacgttcagaatcaagcccataaaagaattactcatgcaggaaataacggatgggttgtgggttgacccatacgcgggagagtgtagccctgcaacgataacaaacgatcttaatcctgaacgaccgacggattatcatttacaggcgatagattttctgaaaaaattcaaggacaaatcggtggatggtgttttatatgaccccccatattcgcaaagacaggtaaaggaatgctatgacggaatcggaattgacgggtgggatggacgcatgacgttttggagtgaggcgaagaacgagattgcaagaatagtgaagccgggtggaaaagttatatgttttggctggaatagtatgggatgcggtgcaaaacgcggcttttcgatggagcgggtacttatggtcccgcacggaggttcgagaaacgacacaatttgcacggtagaaattaaaaaggagtgaagaagagacatggagtttttgcgatttatcttttcgtctttttgggtttggctggggttcgtggttctggtagccgcggcgggtggtgctgttgtggagatcgtcaaggccattcgcccggcccggaagattgcagtatatcgaacgggcgacgttgtgcgcgtggaggttgagggcgcaggccgcggggatattccggcggcggttaaagccgcaaaggagcgggacacggaggacgcggaatgaacgcggcgttattgagcagtaagaaaatggactattgcacgccgcaggactttttcgaccaactgaatgatgaattcgggtttgtgctggacgcggcggcgacggccaaaagtgcaaaatgcccggcgtactacacgccggaaaccgatggtttgaatagtccttggaatcttgcggggggggtgctgtttggtgtaaccctccatacggacgggaaaccgggaaatgggttcgcaaagcctatgaggaatcccggagcgggacaacggttgtcctgctgattccggccagaacagacacagcatattttcacgactacatatacgggaaagcagaaatccggtttgtgcgcgggaggttacacttcaccgatgaagagggaaacgcatacgcccccgccccgttcccgtcaatgttggtcatatacaaccccaaaaaggaggtttcagcgtgaaagtctttaccgtataccaaccctacgcgttcgcaatcgtggccgggttgaagcattacgaaacccgcccgcggcggaccaacattcggggccgcgtggcggtccatgcggcaatcggaggaccggactatatcagcgttgcgcttgattcgatattgccggaatcaatggaacttcattacggcgcggtggtcgggaccgtggaaatcgtcgattgcgtacctgttgaaaaccttgtggacagtctggatgaccgggagcggcttttgggcgactattcgccggggcggttcgcgtgggtccttgaaaacccggtcatgttcgacgaacctttcccggccagagggaaacagggctggtggaactgggaccagcgcgcggcggaaatgtcccgtcagatcaagagggaaatcacgcgcgcggcaacagatttgctatacaccccgcacacggaggacggaataagcgcggtcaattctgctgtttccgaaatcgtgaagcaatattgcgacagcggagaaatcgcacacgggccgacaacggacgatatttcgttaggaggtgcgccgcttgaagttctccctttcctcccgtttgcaatacagactatcagcgggtacgggacatacagtgtttaccgcgggtcggaactggccgggacggtgacttatagcgggcctccggttcaggaaacaccgggagaaggaattatcggaatcaaaacgaatttcaccccggcggaaaagatgaaaagcaaccagtttacttttgctttcaacagcgggaaagacggtgaaaatacatgacctatcaaccgaaagtcattcggtgccgcctccatacgggcggcaagaccattcagaaaatccgggagaggtacgccggacagggcatgacataccgggatttcgagaacattcagcgggcgaatgaagagtttgacgggctggtggttctgctgtccctttgggactacgacaaccacgaagcctatcacctgcataattgggacccggcggacgacgaacgaatgatgatggcaatttatcattccgagcaggtccacccgttcccccggtacaaaaacgcccttgaacagttcaaggcggattgggccgcggggacctacgaccccggcgcgacactatgttttcagccggaggacgtggaggaaatcgaagttctttgcgaagagatcgtgccggagccgcagacggccacacccccgccccggacacccaaaaagaagcgcaggaagcggcgcaggaagtgaggaagccggaatgggagaacaacagaaaatgaccatcgaagaggccatagcgattcttgacccggagacaagacgcgccgccctgtttggttatcggtatttcggagggttcagaggttcggaagcggtgcttgcggccacggaagaggcgtgccgcgtggccgtccgggttatgcgggaatatctcgaacagaaaggcggtggacccacatgaagctaaagaaagttgcttccatttgcagtaaaacgaaaatcttctgtctgtacgaccgggaggaatccggcggagaggtttcacaatggcttggggattcatccgcaatttacccgatcacaggacttccgtacatggatgaagaaaatatctattccatgttcgacatttcagccaaacagcaagagaagatcatatttcgtcaccagcgcgcgccggagggaatcaacctttccgacacggaccagacggaacaccggattgacgaagagagcctttcactggtgtacgacggcggcgtgttgaagccgttgcaaacgcggaacgggatttcgttcattcagaacaagtatttatcgccgctggaagatgtaattgacatggtgcagttgtacgagcgggaaaccccgcagggcatgacatacattgtcgcaaagaccgggcttttcgtcgcggcggtcatcatgccgtataacgtcatcaatgaaaagttcgtctaccacctttccgcgctggcccggcaatgtagccgcgcgctggcggaaaagaagatagaccgacccgcgacggaagccatagacaaaacacagtaccgaatcaacgtagacgaaagcaccggggaaatcatcaatttccccggagaaatggaggcagaacaatgaaacttgcggcattcaatgcaacatgccctttcgagattggcgacaaaattaaaatccggcgagaaataaggggagaactggcgaagcgtttccacctgattccggcaacggttgtcgaagaggtccacacgatcactgacattgtgtgcgtacatagcgtgaagaacgggaccgttacattcatgtatgaactggacaacaacggaaaactggtccatatcgccgcggccccgcgcccggaacaacgggaagccgcgacacaaagcggaggcgtaatgctgattacaggggatgaaagcggcccgcttccgccggaattcgtggacttcatcaagcggcggttcgagtaacgccgcgccggaccgaacagaaagtaggcgaccacatgacgatcataaaaatttccgcctcttgcccctatgaaataggcgacaagatcgtgacggggcgggaaatccacccgccggaactggcgttcagattcccggcggcggtccgcacgatcaccgacattgtgtgccagtacagcgcgcagaccggggaagccgtattcctgtatgaactggacgggcgcgaaccactggtgcggctggaagcaccgccgcggaagaagaaacagaaataataacccgccggagcggggcaaattcagcaaggaggtttaagcggtgaaaactatatcaattatcaacctgaaaggcggcgtggcaaagacgctgaccgccgacaacatggcccacgtcctcgcggttttccacaataagcgggttttgcttgtggataacgacaagcagggcaacacgtcaaaggcgttcggggtccattcctacgacgaaaagagcctttccgacgttctgaccgcccggcggctggacgtgcgggaggtcatcaaaaagacccggttcgagaatatcgacgtattgcccgctaacatgacgctgattcgcgcaaatatggaagtgctgatggacaccacccggccacagcaaacgcgcctgcgggccgcgctggaccccgtagcggggcaatatgacttctgcattatcgacaacgccccggacatcaacatttccacgataaacgcccttgttgcctccgacgacgtgattattccgattaagattgacaagtacgctttcgacgggctggccgaactgaaagaacagatcgaggacacgcgggacgacttgaacccgcgcttgcggctggccgggtgcctgattacctgctttatccgggccgacgcagagaagcagggcgaagcgtggttgcggagccgcccggaataccccgtatttgacacccgaattcggtattcggagaaagtcaccgaaagcaccttttcggaaatgccgattgcggaatacagccgccggagcgggaccgctatggactatatcgcatttgtgcgggaatacctgaaccgcgggaaagattgaatccgtccgattcggacagaaaggggcgtacatcatgggaaaattcaatctgaatcagattttgaacaacgcgtcgcggcaggcggcggagggcgggaacaccccgccccgccccgctgaaagcgaaataaagaaaatcagcgtctttgaccttgtgccgtcggaagataacttctattccatgcgggagattgaagaactgaaagcggcaatcgagatcgccgggaaagttctgcaaaacctgaccgttgttccgctggacggcgggaaatacaaggtcattgcaggccaccgccgccgcctcgcgtcgctggcccttgtggaagatggaaagccgcaatatgaattcgtcacctgttccgtggagccgaacgaagaggcggcggaagatcaggaaatccgggacggcctgaacctgattgtcaccaactcccagcgggagaaaacggcgtgggacaagatcgaggaagtgcgctacttgcgggacgtgctggaaaaggcaaagacccgcccgcggttcgtggccgtcctgcaaaggattgtcaaaaccgtgttcggggacagcgaggttcaggcagacggaacccgcgattttatcgcaaaagtgcttcacacaagcccggcgcagattgggcggtatgacaccattattcgtcacctgtacccggagttcaaagaagaactgaaagcagaccacataaacctttcaacggcttatgaactggccggattgccggaggacgaacagcgcgccgcattcgaggactataagcagaccggggaaatctccataaaggccgcgcgggagaggaagcgggacgcggagacgaaagacggggatttccattgccgggactttgaggaatgcgaatacaacgggcaggacgtttgccgcttgccgcaaggcgaagtttgcccccacagcgcacgggagaacgccccgccccctcccccgccgcaggccgaacagccgccggaggaaccggaagaaaccgcgccacctgatgaacccgtccgggagcgggacgaacacacgccgcccgcggcgcattgcattccctccaccgtcccgcctccgaaaatcgaatgggacaaagcgccgggggcggaacaccccgcagacggcccgcagaacgcgcaggacgggcagaagccgcaggcggtgaagatggacccggagggggccgaaaagcccacagaggacccgcaggggcaaacgggggcggaaagacagccgcagaaagaaacacggtgcgtcgggaaagggatttgcccgtgttgtggcgagaagttcgacgcggggcaggtcacgcgatataacacattcgggacgcaggccgtcggtcccgtgcattgtccgcattgcgggaagatgctgaaaatcttgtgttcggtggaatatatctgttccccggcggaagagtgagggcgtgcagatggacaaaatcgaattggccggatttactgcggaacaggccgaaagcataagagaagccgcgagaaaatacgctgaaagaacaacgtttaccgcggaagaggcaactgaaaagattttgggcgcactaaacttcatttcgggcgagattcgggaagcgttcgacaagctgacagcggtatttcgtgaactggcggaagagttggagccgatagacattgaaccgcgcgtccgtcggaggaagcggaatagggcgcgggcgaagataatcgaacagcaataccgggcggaaatccggcgggcggaaaatacacgaatttatcggcggatatataagccgccctaaagcagagcggaggaagcggacgtgaacagggaaaaagttattgtgattctgcattattacagggacgcagacaaagcaatcaaaatgaacgagcgggttattaagaacctcgaagatcagtattattcgacgttgggggcggtcaattccgacggtatgccgcacgggaaaggcacgacttcaaatcccgttgaacgtgtggtgctgaatatcccccgttctgtcacacagaccattgaccgattgcggcgcgagatagaggaaatcgggaaaataaaagcagagatcgcggaagaattgaaatgcctgaattacaccgaaaaagcgttgattcaggggttttacatagagggcgaacaatgggaacggctttcggcacgagtaaattacagcccgcggcaatgccggaatatccgcgccgccgcgctggactgtctggcaaggaatttcagcgcaaacaaaatcatttcgcgctatcgcttcccggaaaaataagattgccacccattgcccgttttccgtggtaaaattggtattgtggaaaatgaacacaacgattcgggcggcgtattcctccgcgccgttcgagtgcagaaaacggaccatgttttgaacatggcccgttttttacgcgcttccgcggaagtatgcggggcgaaaaataggaaacaaacgaaagggggtgcgtagacaatggcaaaagcgagaagcccggagcgggacaaagtgcgccgggcatggcttgaatccggcggaaccatgacggcgaaacagcttgcggaacaattcggcgtaagggctgaacaggtccgaaaatggaaaagccttgataattggcaagcagaccttgacgcacagaaaccgaagcggaaacgcggcggacagccgggcaataaaaatgccgtgggagcgggcgcgcccgtagggaataaaaatgccgaaacgcacggggcatattccacggtccgcctatgtgatctaccgcaggaacagcgggagtatatcgagggaatcacgctggacacggaaacaaatatgcttgcagaactgcaaacactgattgcaaaggaagccgacctgcaaaacaagattgccgcgctggaacatggcgacccagccgcgctttatattgaccgcgttgttgaaatgcgcgccccaaaagggacaaaacgattagaacaacagcgagagaagttggaagccctgcaacgggaagaagattccatgatttgggatatggacgggagcgacggaaagaaaccaaccagacagcaggaaaagaagctggaagccctgcaacgggagattgccgcattgcaggacaccacgggcgacaaggaacgcgcccttgaacgcgagggctacacggtgacaatgcagactgtcataaaggcaagcgcattcgaccgggctatgaagttagaagccgaactgaacagaatacacgggcgcattatcaaactgcttgattccatcaagggatatgagatggagagccgccgcctgcggcttgaagagcggaaatataatcttgcaaagcagaaactttcaggagcatacgacatcgaccctgaaacgggagagatcaacgacgaagcggaagagccggacgaattggaaatatgaaataggttctttcggcgggccgcgcggcctgcgggtccagcgagccccggcgtttttttagatacgaaatttttttgaacgcttccggggccgggaaaatttttaagggggtatgccaaaaaagcgcgggaggggtggaaaaacggtgaaactttacgacgcgaaagcggttgcccgattcctcgacgtgtcggaacgacgggtgcggcagttgcgcgacgaaaaggtgatcgcagaagttcgacccggtttgtacgacctgatcgacacgaaccaccgctatataaattatctccgaaagaggaacccggagagcgaagagacgatagattacaacaccgagcgggcgaagctggttcgggcaaagcgaaagaatgaagaatacgaattgcagttgaaagaaaacacgcttcacgccgcggcggacatcgaggccgttatgacggatatgctggtaaacttcaaatcccgcctgatggcgattccgtcaaagctggccccggtcctttgcaagaaaacggacaaggcagagatattcgccctgctgaaagatcatatcgacgaagcattgatggaactttccgatttcaaaactacgttcggggaaagagggaacagcaatgaaaaaagcgacggttgacctgttcacccggattttcgcggtgctggcccctcccccgaatatgaccatatcgcaatgggcggacaaataccgccgcttgtcctccgaatcgtcggcggagccgggccgatggcgcacatcaaaggccccataccagcgggagattatggacgcagtttgcgacatgcggattcaaaaagtggtcatcatgtcggcggcgcagatcgggaaaacggacgcgctgattctgaacccgatcggctactatatgcactacgacccgtccccgatcatggtcatgcaaccgaccattcaaatggcggaaacattctccaaagaccgcctttccccgatgttgcgggacacccctgttttacgggaccgcgtgaacgacaagagccggaacagcgggaacacgatcttgcagaaaattttcccaggcggtcatgtgacgatggttggcgcaaattcgccgtcctccctcgcctcccgcccgattcggattctgcttgcggacgaaatagaccgctacccggccacggctggaaatgagggcgaccccctgttgctggccgggaagcggcttgcgaccttttggaacaagaaagaagtgtgcgtgagtacgccgaccaacaaggaaacgtccagaatcgccgttgaatttgaacacagcacacaagaggaatggaacgtaccttgcccggcgtgcggggcatacacgccgcttttgtgggcgaatatcattttcgaccgggacaagctggacgaaatcgggtgcgcttgcccggcgtgcggcgtggtttccagcgaaacggagtggaaagagcagttcggaaagggtaaattcgttgcggcacacccggaacgaaaggtgcgcggattccatttgaacgcccttgcctccctctttgtggaatggcgggaaatcgtcgaaaaattcctgacagcaaacgaagagaagaaaaaaggcaacatcgaacttctaaaagtctggacaaataccgaaatgggcgaaacgtgggaggaagagggcgaacaaatcgaaacggacgacctcttcaaacgccgcgaacgctataattgcgaggtcccggaagaagtgctggtgctgaccgcgggcgtggacgtgcaggacgaccgatttgaagtggaggttgtcggctggggcgtggacaaggaaagctggggaatcaagtatcaggcgatctacggcgacttgaagttgaagcccgtgtgggatgaactggacaagtttctttcgcagacgttcaccaccgcagacgggcggcggctgaaaattatttgcgcctgcgtggattccggcggacacttcacgacacaggtttaccgattctgcaaagagcggacggcccggcgtgtgttcgcaatcaagggaaaaggcggcgcagaagtgccgtacttcaataggccgtcaacggcgaacaatatcaaagcccctcttttcactgtcggagttgacacgggcaaggcccttttatatcaacgactggcggtgcaggaagaggggccgaattattgccattttccgcgtgaaaaggaccgggggtacacgcaagagtatttccgcggcctgaccgccgaaaaaatggtgatcacctataagcgcggaaaagcgcaatacgtctggacgctgaaagacggcgggtacaagcggaatgaaccgcttgatattcggaactatgcgaccgtcgctttggaaattgcaaatccggttttgaaacggacggagcgggacgcggccacagccgcccccgcgcagaagcggcggggcagacgatcaagaaccaacggaggtattttgtaaatggcgggaatcagccttgaaatcgtaagaaagcacctttccgcatggctggaagcggaattggaggttacgacacaccaaagctacaccatcggttcgcggagcctgacaaaagcggaccttgcggacatccggcaacaaatcgaattttggaaaaacgaggttgcgcggctggaaaacatcgaaaagcgcggcgggcgaaaccgcgttttccgcgtggtcccgcgggacctttaagaccatgacaaaggaggcgaagcgggttgaacacgttcgaccgaatgattgccgcagtatcgccgcaacgggccgtgaagcgcgccgccgcccgccggaagctggaaatactggacagcgggtacagcaactacggcgcgtcacagacaaaaaaatcaatgctgggctggttgtatggcggcgggtccgcaaaagaggatatacaagagaacctttccgtcctccggcaacggtgccgcgatctttacatgggcgtaccgctggcaacgggcgcgctgaaaacgtgccggacaaatgttgtcggcgcggggttgcggctgaaaagtcaaattgactatgaggcgttgggaatggatgaagaaacagcacgcgaccttgaacgcaagatcgagcgggaattttccttgtgggcggattccccggcctgcgaccttgaacggctggacaatttctatgaactgcaacaactggcctttctgaactggcttatgagcggcgacgtgatcgccacgttgccagtgacaaagcgggtgaactgcccgtatgacctgcgaatctgtctgattgaggcggaccgattgagcaacccgaacggaacggttgacccgcatttcgtcggaggcgtggaaaccaacgacgcgggcgaggtgatcgcgtaccatatcagcaagcaccatccgttgtcctacgatgcaagcgaatatgggtggacgcgggttgaagcatggggcgcaaagaccggacggcggaacgtgcttcacattatgaaccgggagcgcatcggacaacggcgcggcgtgccgtttctggcccctgtcattgaagcattgaagcagttgggccgatataccgacgcggaacttgtcgccgccgtggtttccggtatgttcacggtgttcatcgaaaaggaatccgcgtccagcgacggaacctttggcgagatcatcccggaggaagcgcaggtggacgcgggcgacgacagcacgattgaacttgcgcccggcgcaatcgtggacttgaacgagggagaaaaggcgcacgacatgaaccccggcaggccgaacacggcgtttgacgggttcgtggttgcgatttgcaggcagatcggcgcggccctcgaaatcccctatgaactattggtaaagaacttcaacgcgtcttacagcgcgtcccgcggggcgttgctggaagcgtggaaaatgttccgaatgtaccggacatggcttgcaaatgacttctgccaaccgatttatgaagaatggttcgcggaggccgtggcaaagggacgaatccccgcgcccggattttttggcgaccctatcattcgcaaggcgtacacaggcgcagaatggaacggcccggcgcaggggcttttgaacccggtgcaggaagtgaccgcggcggaaaagcgggtgcagaacggattttccacccgcgaccgggaagcaatggaaatgaacgggtccgatttctaccggaacgccgcgcagatcaaacgggaagaaaaaatgttaagggaggcgaaagcagatggcacaggaacagagccgggcgcaggcccagcacaaacaggtaaagaataaacatttctggacgttccgggccgcggcgggagataacgccgccccggaactgattttatacggcgacattgcttccgaaacgtggtggggcgacgaagtgaccccgcggcagtttacagaggaattggacgcgctgggggccgtccctgaaatcgttgtgcgaatcaacagcggcggcggcgacgtgttcgccgcgaatgcgatttacacccgcctaaaggacaacgcggcaaagatcaccgtaaaaatcgacgggtgggccgcgtccgcggcgacgattgttgcaatggcaggcgacgtgatcgagattccggggaacggcgttttcatggtgcatgacccgtccttgggcttgctgggctacttcaacgaagcggaccttgcaaagatgaccgaggaattaaaagtggtcaaacagtctattgtgaatgcttatgtcctgaaaacggggaaagacgcggcggaggttgccgcaattatggcggcggaaagctggtttgacggaaaacaggcggttgacgctggattttgcgacaagctgatgtttgaggacgcggaaaccaccattgaaaacgccgcgaaaatcgttgtcaacagcgtttcgctggacctgaaccgttatccgaatatgccgatttcgttgttaaaccgcacgacggcccgcgcgcacggcggtttttcaaataaaccaacaacaaatgaaccgaaaaggagcgaagagaacatggacggaatcaaagacattaagaccgtggccgacctgaaagcggcttttcctgacctgacaaagcagatcgaggaagcggcgaccgacgcggagcgcaagcgcattcaggacatcgaggacgtggcgattgcgggctatgaaaccatcgtggcggacgcaaagttcaagacacccattgccgcgggcgacgttgcgaaagcgattcttgcggagcagaagaaacagggcggcaagtacattcaggaccgcgacgacgacgcgcacgcgagcggcgcgggcaacgttgggaccggaggacagcgagagggagcgggcggcgacggccccgacgaagtggacgcggccattgacaagctgttccccgacgtaaagtaaggaggaaagaagcatgtacgagattcagaaagaccagacaagcccggtgaatttttttgcgggcgattatcccgttgcaacagcggtccgcgaggtttcgagcgggaaaagcgtcaagaaatacgaccccgtgaaactggttggcggcaaggtggaacccatcgtcaaggtggacgcaagcgcggctgacagcggaagcactaccccggcaaaaacagagtacgagaacaccacggcgggaatctacggcattgcggcgggcgacgcgggagccggagaagatgtcgttgtttacctgacgggcgaatttttcgcggacgcaatcaatctcccggacagtgtgaccgtggaaaccctgacaaccgcattccgaaatatcggaatctttttgaagtaaaggagaggaaacaaaatgggaatcgaaactaccatctatactccccgcacgctggggaagctggttcggcgtatgcctccggtgcatacgttcttccgcgatacttttttcaagaaccgccggacgttcaacacgaagagcgttgacgtggacttcaaaaaggggtcccgcgcccttgcgccctttgttcatccgaaagtaggcgggaaaaccatcctgaacacgggctatcagacgaagagttacacccccgttctgctggccccgaacaagattaccaccgttgacgacctgttggagcgggccgcgggcgaggacccttacagcggcagaaagcccgcggaacgcgccgtggaaaagctggcggaggatttgcgggaactgaacgaaatgatcgtgcgccgggaagagtggatggcggcgacagcgatctttacggggcagattccgattgttggcgagggtgtgaatgaagtcatcgactttgacttcaccaacaaagaaaccatcgtgtccgccgaaaagaagtgggacaacgcgcagagcgacccgctggcagacattgagcggtggcacgaaatcgtacagcgggaaggtttcgtgaactgcaacgtctgcgtcatggcgaaagatgttgcaacagcgttcattaaccacgcaaaggttaaagaagtgctggacgtgaaagcctatgatcttgcggtcatcaagccccggcaacttccgaacggagcaacttacatcggcacgtatcacaagttggggcttgacttctatcagtacaacgaatggtatctggacgactggacggagccgggcgaaccggaaaacaagcccattgtaccggacaagcacattgctttgctttatacggaggcggattactccatctactacggcgcaatcactatgattcccgaagagggcaagggatttgtcaccgtggagggcgacaaggtgccgcagacatggattgaacgccgcccggaccgccgcttcctgcaaatcaacagcaagccgctgaccgtcccccatgaggtcaatagctggtacgtggcgcaggtactttaaccatgaatttcaaagatcaggtggagcgggatttgaccgccgtattccacaacagccgggaacacgccgacgttgtggaattctggattgacggaatccgctacaaaggcccggtcatcatcgacgacggcggggcgcaggaccggaagaagccgtccacggaccacgtggacggtttgattcttgtcgatcttgtcatgtatgttccgctgtccctgttgaaaaccatcccgcaaaaggacctgaacgtggaaatcggggattgcctgtaccgaatcacaaaggttcacccggaagcaggggaaatcgtgctttacatggaggcgttgaccgaatgattcagattacagccgaccagatcgagcgggtgaacctgattctttccggcgttccaaaaggcgcggaaaaggcaatggcaagcgtcattcgccgggccaacaacaccgtgagaacagaggccctaaagggcatcacgagcgtttacgcaatcacccggcagaatgtccgggcagacaccacaatcaaagtgcggacgcagaaagcggacggcggggttgtgggaatggtatcgtttgccgggtacaaaatccccctttaccgcttcaatgtctccccgaccctccccgtccagcgcgcgaccgtttcggcggcggtgctggcggagagcgggcgaaccccgtttgcacacgcatttatcgcaaaaatgaaaagcggtcatacgggcatgttcgagcgggacggaacaggcagacttccgatcaccgagttcatgggaccatccgccgcacagatggcggcgaacagcgtggttgtggagcaggtggaggaaaaggcgcaggaagtcataaacaagcggattgaacatgaaatcacccggattctgaacggctacggaggataagacatgacacctttagaccttttggacgtgctggaagagttcgtgcggcgcgaaacaaaggacatgcttttgcctgtccgcgtagaccgccggagcggagagccgaaagagcggcccgcggaaatttacaaaatgcggttgccgaccaaaaaggcgcagaccgagcgcgtcccctatctgctgttgcagtacatcaaaagcacagacacacaggagccgggagaggaaccggaaagcgtctgtacggtgcgaatcgtcgccgcgacgtattcggaggacgaaagcgagggcgcaacatgcgttctgaacctgctgacccgaattcgtgttgccctgttgaaagacggcgtgattggagagcggtacatgctgaaaccgccccttgaaatgattgtgtacccggacggaacgacagccccctactatttgggggaaatgatgacggaatgggaaatgcccgttgtagaaagtgaggttcaaaaagtatggcaatgaactataaacccagcatgacgaaagcggaattgctggaaatcgccgccgcaaacggcgtgcaggccgacgacggcatgacaaaaacggcaattcttgccgcgctggacggcgcaaacagccgcgcgcccgacggggcggaactgaacaccggcccggagggaaccgacgcagacggccaacaagccgcacagggcggcgcaggacaggccggggacagagagggggccgaggacaccgccgggcaggaaacgcccgcagaggacgcgcaggaagccccggaggggtacaacctgttcgtctatgccgggccgtccctcccccacgggagactgaaagaaaacgccgtgttcaacgggacgttcgaggacgtgaaagcgtaccttgcggacgtgatcgcggactatccccttgttgcgcggatgatcgtccccgttgagcggctttccgcgtttcacgtcaaggtgaaaacgcccggaaaccttgcgcacaagtattacaacgacattgtttcgacaatgcggggaaacaaggaggtataacaaatggcagagtatttccacggggtttcgacgcggcaggttgacacgtcggtttcgacccctgttacggcagattccgggattgcgttcgtcgtaggcgcggccccggcgcacaccgtcggcggaagcgtgaacgacccgatcatgtgccagagttacgcggaggccgtggccgctatggggtacagtgacaactgggaaaactatccgatttgcgaagcgatctatgcacagttcaaactgtacggcgtatcgcctgtcgtattcgtgaacattctggaccccgcaaagcacaagaagagcgtttcggagcagaattacaccgtcacggacggaaaggttcttttgccgctggaagccctgaaagacacggtgaaagtcactgactataccgcaggcgaggatttcgacctgttctacgagggcgaaaatctaattcttgaagtgatcgagggcgggagcattccagagcggacgggagaactaaccattgcgtttgacgcggtggacccctccaaaatcgcggagaaagacattatcggcggttttgaggtaagcacaaagaagtattccgggttggaactgattgacaaggttttcccgaaatacggaatcgtgtgcgacatgattcttgcgccgggatggtcccacaaatccaccgtcgcggcggcaatgcgggcaaaggcggaaaccatcaacggcgttttccacggcgcaaaagccctgattgacattgacacaacggaagtcacgcattacgcagacgcgcccgcgtggaagaaaacgcagaacatcaacgacaaggcggaaatcctttgctggcccctgttcgggctgggcgattacgtgtttcatgcgtcggtccacaccgcggcgcggatgacggcgaccgattcggacaacggcggttgcccggcggaaagcccctccaacaagtctttgcagatcgaccgggcgtgccttgccgacgggaccaccgttcttctcgacctgaatcaagcaaactacctgaacagcaacggcattgtaaccgcgttaaatttcattggcgggtatgtgctgtggggcaacgaaaccgcctgtttccccgccgatacggacgtgaagaactacttcattcccgtgtcgcgcatgttcggatgggttgcgaattcgcttgtcctgtcctattggagcaagctggacaagaagatgacgcgccgcctgatcgacagcatcgtgaattccgttaatatctggctgaacggccttgtcaacgaggaaaagctgctgggcgggcgcgtggaatttctggaagaggaaaacagcgaaaccgcgcttatggctggaaaagcggttttccacatctacatgaccccgcccagcccgatgaaagaatgcgaattcgtgttggagtacgacgcggactatgtttcgtcggctttggcggcataaggagggaaagacagcatgaaagttgacaacggcacaaccaactttgccgtgtatgaggacgcgacggagttttacggaatggcggaagctacgcttcctgaaatctcgcagatcacggaggaagtcaagggcgcgggaatcgcgggcgcgttcaacggcgcgttcgtcgggcatatcgaggcaatgacgctgaccctgaatttccgttctgtgaccgccgacgcaatcaaactggcagagccgcgcaaccaccagcttgacttgcgcgcggcacaacagtattgggacaacagcgcgggcaagttcattcaacaggcggtaaaacacgtgctgatggtaacgccgacgaagtttgcgcccggaaagctggcccccgccgcctccgcggaagcgtccggggagtatgcggcaacctatttcgcaacctacatcgacgggaaaaaggtcctcgaaattgatattatcaatttcatttactacatcaacggaaccgactatctggccgacgttagaaaggcacttggcaaggcataagcccggcgggggttctcccccccgctgggctttcctttgccctttttctgtatttgaacctatgaaaatctgaatggaggaattgaccatgaacgacaccgagaaaaaaaccaccacagagggcgcagagcggcccgcaggcgcggcggaagccgtcacccatgaaccagcacaggaagccgcagagaagcccgcagagggcaacacgggcgtttatacgcacgtgttcaagaagcctttcgagtatgagggaaagacctacaccgaactgacgttcaatttcgagcggctttccgggcgcgacatggtttccattgaaaccgaaatgcagatgaacaacgaatacgcccttgcaccggaaatttcccggagttttcaagggaagatggcggcaaaggccgcgggcatcggaagcgacgtgctggaagcaatgcccctgaaagatttcaacaagatcaccaacgcggccagaagttttttaatcgacacgggcttttaagaagcccggcccgctggtggcggcgggaatgcttcaaactggcacaggcaacctttacgcccgttccattctggcttgacatgaccgtgacggagatcacggcatggattgaggacatcaacgccgccacagcggagcagaagaaccagaaagcgaggtgaagaatttggcaggaagaaaggaatatgaacttctcttcaaactgaccgccgcattgggcggaaacttcaatgcggcattcagtagcgcgctgaataccacgcggcaaatgcaaaacagcctgcaaaagctaaattctatcaccggaaagatcgacgcttacaaaaagcaggaagccgcccttgaatcgaaccgtcaaaagctggaacggctgaccgcagagcatgaacgactgcaacgggaaatcagcgaaaccggagagccaacggaagaactgcgggcaaagatggcgcagaacgaacggcagatcgcggcgaccacatcgagaatcgagcaacaggaagcgcggctgaacgaattgggcggagaactgtccgacgcaggggtgaacacctcccgtctgaccgaggaaaacgaacgattatccaaaagttacgagcgggtcaaaaaaagtcaagaggaattggcaaaagtaaacgccgcgttggaacagaacaacgcggcgatttcaaagaccaaaacgcaacttgcggggaccgtcggaacccttgcggcacttggaacggcaatttacgccgggccagtgagaaaggccgcggagtttgaagcgcagatgtccaccgtagaagccatttccggcgcgaccgcggatgaaatgaagcgtttgtcggatgaagcaaagagaatgggcgcgacgacgcagtttaccgccgttgaagcgggaaaagccctcgaatacatggcaatggccggatggaaaacagaccagatgttgggcggcttgccgggcattatgaaccttgcggcggcatccggcgaggacttggggcaggtttctgacattgtgacggacgcgctgaccgcgtttaacatgacggcagatcaggcgggccgctttgcggacgtgctggcgcaagcgtcgagcaattcaaataccaacgtggcaatgatgggcgcgactttccaaaaagtggcccccgtcgcgggcgcgctgggatattccgttgaggacgtttcccttgcaatcggcctgatggcgaatgcgtccataaagtcggaagtggccggaacctcgctgaaaaccgcccttgcgaacatggcgaagccgacaaagcagatgaaagagtacatggacaagtacggaatcagcctgacgaatgcagacggaagcatgaagtcattccgcgaagtggtggacaatctgcgaagcagtctgggcgggttgtctgaaacggagcaggtggcggcggcaacggccattttcggcaaggaatcctttgcggatatgctggcgatcgtcaatgcaagcgaggcagattttcaaaaattgtccgattcggtcaacaattccgcaggcgcggcggagcgaatggcgcaaatcaaactggacaactttcaaggaaaagtaacgctgttgcaatccgcggttgagggtctacaaattgcgctgggcgacgcgctgttaccgacgtttaccgagggcgcggaaaaggccgcggagctgatctccaaactgaccgagtttatcaatgcaaacccggagttggtacggacgatcacaaaggttgtcaccggacttctggcgttcaaggcggcggggctggtggcaaagctggcatttcttgacctgaaaggcggggtactgaccattcaaaaggtcatggccctgttcaaaggcaaattcgcccttgcgggcgtggaagccgtgggctttgcgtctaaagtcaagggcgttgcaaaaagcgtcacagggtatttcggcggaatcggaagcgcggcgggcggcgtaggccgcgcgttcgggcagatgttcgccggaacgaaaatcggaaacctgttttccggtatcggcggagccgtgggcggcgtgtttacccgcatattttccggcgtgggcggcgttgctacgcgggcgtttaccggagtagcgggaaccattaccggaatattggggcgggccggggccgcagttgcggcgggtccgcttggaaagattggaagcgtggttgcaaaggggttcgggaagctgtcaaccctgttcggcccgcttcaaaagctgggcggcgcaatcttggggccgttcagcggcattcttgggaaagtgcttcccgtcgtgggtgtgatcaccctgattatttcggcggtgcaaatcctgcgggacaatctggacaaggtgcgcgaggttatccgaaacgtgttcggggacgcgggtgttgaagtgttcgacaaaatcgtgtccgcaatctcgaatatcggaagcacaatccagagcatcttcacagacgggaacttgggcggagcgcgggacttcctgatcaacctgttcggagaggaagcgacgggcgttatcgacggtgcgatcacggttttgcaaactgtgtggaatatcctttccggctttatcgagttcgtgaatacctacgtccgcccgattgtggaacagatttttacattcatcgttcaaacggtgcttccgcagatcgcgcaggcgttcgcggattgggcgccgacaatcgcttccatcctgcaagggctggcaaccgtcgtttcgacgatcgcaacggccattatgtccgtgattcagtttcttatgccgacgattcaaaatattatcagcgttgcgctgacgaccattcaaggggttgtgtccggcgcgctgacggcgattaaaggcattgtggacgtgttcgcgggcatcttcacgggggattggtcccgcgtgtgggagggcgtgaaagggatattcagcggcgtttggaattccctgaaaagcattgcaagcggcgttctgaacggaattatcggcctgatcaacggcgtgatttccgggctgaacaaactgaaaattcctgattgggtccccggcatcggcggaaagggcatcaacattccgttgattccgacttttgcaaaaggcacgaaaaacacgcctgacacgttcatagcgggtgaagcgggcgcggaacttgtcacgaatgcaaggaaccggaccgttttcaatgcggcggaaaccggggctatcttccgcaatctcgcaaacaccgtcaacaccattcgggcgggggttggcgttccggccctgcaactggcttatgcaggcgcggaggcccccagcgtgtcggcaccgtctatcgcgtccggcgcgcggcaagcgtcgatcgtcattcacagcgcgcccgttttccatgttgggagcgaggcgcaggcggaggacatcgaagaactgctacgcaggcacgacgaagaactgctggacgaaatcgaagagcggaagcggcaacaggaggacgacgaaaggcggcggaactatgactaaatacaccaccatagccggggacatgtgggacgcaatcgcctataaaacgctgggcgacgaagcgtacacggacaggattatgaagctgaacccggaataccgccgccttttcgtgttccccgcgggaatcgtgctgaccatcccggagcctgaatcacaggttgcggcggggttgccgccgtggaaaagggggacggcatgaacgcgagaagagcggttatccgcctgaccttttcgggggtggatatttcggcggacatcaacaagcatcttctttcgctgacctacacggacaacgaagaggacaagacggacgacctgcaactatcccttgacgacaaggagggcgtatggctgggaagctggctgaatacgccctccgcgtcaaagggggcggaaatctccgccgtgattgtgcaaaagaattgggaatcggacgggaaagaccgggttcttgactgcggcgtgttcgccgtggacacagtggacggaagcggcccgcccgcgaaagcgaccatcaaggccgggtctatcccctacgcctccaccattcggacacagaaaaagacgaaagcgtgggagaaatacacgctttccggcattgcaaaggagattgcgggggcgaacgggtttacctgcatgtttgaatccgcgtccgacccattttatcagcggaaagagcaaatgcaggaatccgacatcacatttttacagcggctttgcaaagcggctggaatctccctgaaagtcacggcaaaaatcatcgtcctgtttgacgcggcggcgtatgagcagaaagacgcggtgcggaccatccagcggggaaaagcggacgtgggaagctattctttttccacgagcctgcacgacaccgcgtacagcaaatgccacgtgtcctacacagacccggccacggggacgacgatcgaatatacctacaccccgcgggacgcggacaagagcggccaaacgctggaaatcaacgaaaaggtatcaaaccgtgaagaggcccggcaactggcaatgaagcggttacgggaaaagaacaaaggagaattcaaggcatcgttcaagctggccggggacgcgcgccttgtggcgggcgtaacggttcaggtggccgggtatggggcgttcgacggaaagtacatcatcgaaacggcgacacattccatatcccgaagcgggtataaaaccgatctgaccttgcgccgcgtgctggagggctactaaatgagcgaattatccgttttgaaaaatatggtccgaacgggcatcgtctcttctgtcaacgcagggaaccgaacggcccgtgtgaccttttcggacaagggagaaagcccgattgtttcgggagaactgaaagttctgaaaaatgcgccattcatcccggcgcagaacgcgccgcaacggacggaaaccgagagcggcggaagcggcgacgcggcctttgcgggccacagccacgccgtcaagatcagcccatggctaccgtcgccgggggattacgtgctttgcatctacctcccgacagaggacggggacgggttcgtgattggggggatttgacgatggcagaaatcggaagctgggggacgttcaccttttacgtctcacggtcatccatcaagacgtttgacgacctgaaatgggaaagttcggtgaagtacgccacgcacgagcggcatttgaaagagccgcttttggagttcacagggcaggacgtggaaagcatgtctttcaccatgttcttttccgtctttttgggcgtgaaccccattgcggaggttgcgaacctgcttcaaaccatgcggcggggcgaggcccattacctgatcatcggcccgaaagcgtatgggacaaacaagtgggtcatcaccaaactgtcaaattccctgcaacgatacgaccggggcgggaacctgctggccgcatcggtcaacgtaaccatgcaatcatattcgagcagataggagggcggacgatggcttacaccgtaaaggcatacgcccttgaaaaaatcaacctcgcgccggaggacaccacggaagaggtattgcagaacgtggcggtcatcctttctacgccgaaattttccgttccgttggagcggggcttggggctggcgcaacggtttcttgacaaaccgattccggcggcgcagtcaatcttgatttcggaggtactcgaagcgatcgaggaattcgagccgcgggcggaggtggaaaacgtgacctttgaattgggggacaggccggggaccctgattcccattgtggaggtgaagatcattggcggcgacgaataggagttacccggacatttcctttgtggaaaccgacacggaaacaatcgtgaacgcgctgattcagtcatacgagaagttcaccgggcgcacgctgtacccggcggacccggcgcggcttttcgttttgtgggtggcggacatcatcgttcaagagcgggtgaacatcgacttttcggcaaaacagaacgtgccgcggtacgcggagggggaatatctggattccctcgcagaactgttcaaggacacgtaccgattggagccggaaaaggcgaaaacaactttgcgctatacgctgtccatcaaacttgacaccgcaaccgtcatcccggcggggacccgcgcaacaccggacggcgacgttgtgtttgccacgcttcaagacctgaccattccggcgggccagttgtccggcgacgtggcggcggaatgcacgcaggcgggagaaatcgggaacggctttgttccggggcaaatcaaacaggcggttgacgtgttcccctactttcaaagcgtgtcgaacacaacggagagcgcgggcggcgcagatgaagagagcgacgcggcattttatgaacggctacgggagagcgtggaaacatactccacagcggggccgatgggcggatatgagtatttcgcaaaatccgcgtcggccctgatcgcggacgtaaaggccacgtcgccggagccgggagaagtggacgtgcgggttctgctggcaggcggagaactgccagaggaagaaatcttgaaagaggtttcggaaatcctgaacgcggacacggtgcgcccgctgaccgaccatgtgaccgtcaaggccccggaaaccatggcatacaacatcgacgtgacctactacacacaggagggcggcgcaatcagcgacgacgtgatttcggagaacgtaaacgcggcggtgggcgcgttcaagaaatggcaggcggagaagatggggcgggacgtgaacccgtcctatttgattcaactgcttatgcaagccggggtaaagcgggtggaggtccgcgccccagcttttgcgacggtgaaagacaatcaggttgcgaaaatcggaacgaccgccgttacgaacgggggtgcggaaagtgaatgacaacgaactgcattcggcagattatacgcggtccctcccccctcccctgaaaaacgacccgaccatgacggcccttgcgcgggtcattgcggagcagttgcaagggacggtccagcagatcgggaagaacatcatatacgcccggattgacgaactggacgaacagacgcttgacgtgctggcctatgatctgcatgtggattggtacgactattcctatccgatcgaagtcaagcggcagaccatccgggacagcgtgcgcgttcaccggaggttggggacgaaatacgccgtcgaaaccgcgctgggggcggtattccccggaacgcgagtgcaagagtggttcgagtacggcggagaaccgtacatgttcaaagtcatcatcggcgcgacggaatcgggggtatcggcggaccggcaagcggcggttttggagcgggtgcgcttttataaaaacctccggtcccatttggaagcaatcagttatcagattgagaaaaaagcggcagtattcacggcggcggtccattccgtcggcgtgcgactggaagtttacccctatcttgcggaggacatcgaggaaacggcgcgcatcaaggccggagcgggccacaccgtcggcgtgcgcgtggacatttacccgcatgtttaccggaagatgggggcagattggcgcgcgttatgcgccgcttatattcagcaaaccgggaaacttgaaatcttcccgcagaacagaacggaggcgtaacaatggcggaaatcgaaaacaaatatggaagtattgtgaccgacgtaggcattcagcttgtcacggaagcagtcatggagggccagaaagtcaatattacgacccttgccgtgggagacggcggcggaagctactacaagccgaattccacaatgaccgccctaaagggcgagaaatggcgcggaaaggtaaaccgcgtggaggtcaacgagaaatccccgaacatgattgacgtggtggcggtggtcccctccgacgtgggcggctggactatccgggaaatgggcgtgttcgacgacgcggaagagccgaacatgatcgccgtttgcaatacgccggacacggaaaaggtcattatcaccagcggagccgccggggaaattgaactgactatgcacatcgaaatttccaacacgggcgcgatctcttttgtcatcgacccgaacgtggtaacggccacgaaaaaggaccttgcagaccacaacacgtcgcagacggcgcacgccgcggagtttaagaaaaaggcagacgttaccgccctgaacgaccacgcgaacaacagcgacattcacgtgaaccccacgacgatggggaactatgacacggccattgccggactgatcgaccacacggaggacacagaagttcacgttcagccgggcgagcgggccgcgtgggacgcaggcgcggaggccgcagagcaggcggaggcggacgcggcggaagccctgtccgctattgcggggctggaaagccgcgtttcccgcgtggaagatggactgttcaacaacatcaccggaaacccgtttcttgtgcaatttgattccctcgacggggtggttatgacaaagggcatttggaacgcggccagaaacagaatcgaatgttgagggaatacgcctgcacacggcgggaactgtcctgcatcattgggaatctgtttgcggagctggacccgccttgcgccgcgtgcgattccgacgctgacgaactgacgatcagcgggcgaacctataccggggcgcaggcggttctaaccgtcacggaatggggattccggttcgacggggacccgtcggagattgaagaaatccggggaaagaggtgcttgcggcgtggcggatgaaaaagaatttatcatcatcacgaaagcgaaagatttagcctttcacacctacgacatgaccaccgcccgccgctttccaaagcggcacgggaaacttgccgtagacctgatggaatttgcgcgggaaatcgtggttcatattcaggacgcgaacgaacttgacgttcaggacgcgggagaattccgggaacggcggtatgaacagaaacaggccctttcacgttgtaaagacatgctgtttttgatcgaactggccgaacgaaagaacctgatttcaacgacgcaatgcgcggcgtggacaaagtacgccgtggaagtaaaacggatgacggccagttggagaaaaaaggacctcgaacggttcacggaatccagacaacggggaaacgcgccgcggcggtgatcgccggggcgtttttcttggggtgcggcttgtagcgtcgaattcgtacaacgtccgcaacgtcaattcctccggcgcgatgaactggaacaacgcgtacaacggcaacaggggcgttcgcccgctttggtggaataccgcgaatgagtaagccaacggctgaaaacagaggaccactatcaaaggaagccgcatccctccgccgcggtgacagcgcgacggtaaacacaagattggtgaagcaaggcccacgggaaccagtttccgccccggcgcgggcgcgcggcggggtccgatgatgaagcattgcgacggcaggcgcaggccgcttgccgtccccgcaaggccgattctatacacggcaaggagttattttttattattatgcaacaaacagaattcgagcgggtccacgatctcgggaacctgtacgcagggtttctaaaagcccgccggggcaaacggggaaaagaaagcgttgcgaagtttgaagcaaaccttttggaagccctttgcctgctttcggaaatgctgaagaacaaaacctatcgcccgtcggaatatttcgtatttcgggtttacgaaccgaaagaacgcattgttatgaccaacgcgttcaaagacaaggtggttcagcattccttatgtgacaatgtgttagaaccagcgttttcccgtacctttatccgcgacaactacgcgtcgcaggccgggcgcgggacgcatgacggactgtatcgactggaagcgtttatgcggtcctattatttcgagcggaaagcgcgggaagaacaacggtgccgggaggaggggttgccgcggcccgacccgcgcgccgcccattatgcggacggctgggttctgaaatgcgacatatcaaaatatttctactcaattccgcatgagccattgaaagcaatggtgcgccgcttcatccgggacccggacgttctatggcttgttgatatgatcattgacagcacggacgaccccggaattccgatcggcaaccagacttcacaatggttcgcggtcatgtacctttcggggcttgaccacttcataaaagagaaattgggaatccgctattatgggcggtatatggacgacttttacttgattcacgaggacaaggcgtatttgcagtattgccgctgggagattgaaaagtacgtggccgggctgggactgaaactgaacaacaagacaaatattttcccattgcggaacggaattgatttccttggattccgaacctatatgaccgacacagggaagatcgtgcgaaaggtaaggaggaacagcaaatgtaacgagcaacggaaattgaagaaacagcggggcttgctggacaaggggaaaattacccttgcggcaatcgaacagtcatacggaagttggcggagccatgcggcaaagggcaactgtcaccatcttatccgggaaacggaccgcctgttcaaaaaattattcaaggagagtgttaaacaatggcaaaaagtttaagttcccttgccgttggcgcgctggtcaaggacacggggacgctttacaacgggaaaccgattatctggaagatcgcggacaagaaccacgccgggtttccggcgaattccgtcacgctgatcacagaacgcattatctcgctgaaatgcattgacgctatggagcagaacaacggcgacggaaaccgccgttcctacggcaacaaccgctggatttggtcaaatatccgccgatggctgaacagtcaagcgggggcgggcgcgtggtacgcggcccagcacgggcaggacgcgccgccgaacaactcgaatgtgtggagcaactacaacgagtacgaggcagaagcgggctttctggcggggttctccgcgaacttcattgccgccctgctgaccacgaaccggaccgtcggaaaagcgcaggtggacggcggcggaacagaaacatgcaccgacaagattttctttgccacgtcaacggaagttggattgtcgggcgacgtggtggccgggagcaaacttgcgctattcacggatgacaattcccgcaaggcgaagccaacggcggaatgcgtatcaaaaagcgaataccagacaagcagttttaacgtcaatgacccgtggtactggtggcttgcggacgcttatgcgtcgaattcgtacgacgtccgcagcgtctattcctccggcgcgatgaactggggccacgcgcgcaacggctacgggggcgttcgcccgctttgtaatctaaaatctgaaatcttggtatctgataacccggattcggacggcgcatacacgatcatttggaaccgcgccccgtcggtcccggattccatcgacgttccgagcgacgttcggggcggcgaaaaactgaccgtgacgtgggggacctccaccgacccggacaacaacctttcggggtatatcctcgaacggcagtacaacggcggcggctgggcgcaggtctacaagggaatcaaccggacgtacaccgaccagatcacaaagggctgggagaatgtggcgtaccgggtcaaagcatacgacagcgcgggcgcggaatcggcgtacaaaaccagcgcgacacggacggtcatcaacaacacaccgcccacgatcagcgggacagatacggaccttggggcaaagaccggagcgttcgaccagaaatacaccgtcaccgacccggacagcggccagacgatcaccgtcgttgagaagatcgacggaacgcaaaagcggtcctacgccgcgaccagcgggcaggaatacacgttcagcgtgaccgcggatgaatggcggaagctgttgaacgggtcccacacgctgacggtgacggcgacggacaattacggcggagccgcgacgcggacttacacattcagcaagaacgaaactgaaatcgaactgacccttgcaacgccccttgaagccgacgacatggtgacaaaggcgattatgtccattacccggcagattccggcaggcgcagaattcaccgtggaggcatgcaacaacggccacgacgattcccccgcatgggaggacgtgacgcaggccgtcaccagcgggagcaagttttttctttccaacgacagcaagacggcggaggaatggggattcaatttccgaatcaaggtgaagcggaacagcgcaagcggggattgctttatttcatccgtgggagggaattttgaatgagcgtacagcataagcggacaagcatcaagaacaagccgaaaacggttgaagaattgaccagagaaaatgaacagttgcaaagacaaaatgaaagcctatcggtgcaggtgacagacctgcaacttgccctttgcgacgtttacgaaatgatcgaagcgaccgtgtacggcgcagagtaaaggaggggcgaacatggaacgggtctatgccgatctgattcaaaagggactgaaaacgattgatgatgtcccggagcggttgcgcgacaaggtacgcgaactgctgaaaacggctgaaagcgggggcggcaatgagtaacgcgctgttcctgctttttgcatacatcttttgccgaaaggaggtggaaacgatggctgttgtttatgcgaccctgatcgtcaagggcaaaaagaccttggagcaggtccccgcgcggctaaaaaccgaggtggaagatctgctgaccgcccttgaaatcaccctttaagggaggcggaaaggcccccggcgcgcaatccgcgccgggggcgatcttctacacggagggaaacagacgtgacattgaacgacttattttccgggggtggtgccgtcggcattctgcttgtcgctttgaccctgatcgagattgcccccattaagatcaacccgtggtcaaaaatcggaaaggcaatcgggaagtgcgtcaacggcgacgtgatcgaaaagctggacgaaaccagaaaaacccttgatgaccatatcagggcagacgacgcgcgaaacgcagatatgcaccgggccgcgattttacggttcaacaatgagctattgcgggatattccccacacgcgggaagagttctttgaagttttaagcgaaattgacttttacgagcaatattgcgacacccacaaagagtatatcaacaaccgcgcaacacacgccgtcgcaaatatcaaacgagtttacgacgacagattgataaagcatgattttttgtgaaaggcggtgtgaaacgtgctttaccttatcagcgccgccgccgggctaatcggtggaattgccgcggttctcctatttggcggacggcggagccgccggaagaaagagcaggaccgccgaaagatcgagttttcaaaactggttctttcggcggtgcttttgacctatttcgcggggttcgtcgtcggcgttcgtgtcgttatcctcgacccctcgcaacttggcgttttcctcgcctatgtgggaaccccggcggcaacggcaatcggcttttacagttggaaagcaaaggcggaaaacgtggtgaagatcaagcaggcaaacccgacggcgacggagggaatgcccgtagacctgaacaacattcagccatagcggaggaacacaaatgacacaggaacaaaaagcatttattgagcgggtgggcgcgctggccgcggcggatatgcagaaaagcggcgtgcttgcctcgctgacaatcgcgcaggcgattttggaaagcggctggggaaaatccggcctgaccgtcaaggcaaacgccctgttcggcatcaaggcggggacaagctggaaaggccgggtttacagcacgaaaacgcaagagtgttacgacggcgtgaactttaccaccgtgacagcccttttccgggcatacgacagttgggaagagagcgtggaggaccattcggcgttgctgacgggcgcggcccggtacaaagccgttgtcggggagcgggactataagaccgcttgccgggcgatcaaggcggcgggctacgccacggacccgaagtacccggacaagctgattcagattatcgaatcatacggcctgacggcctacgacggcgcaggacaggccggagcgggcggcgggtcaaatatcacggctggggcggaacgccccgcagacgcgaaaggagagggcaaaatgaaagcgtctgaattcatcaagaaactgcaagacatcgtggaccattacaagacactgtacgtcatgggctgtttcggcgcgcccctgaccgggggcaacgtgtcccggtactgccagaaccacagctacaacaagcaggcggcgcgcacggccatgatcaaggccgcggcgaatcagaacccgcccgttttcggctttgactgcgtgtgcatgatcaagggcgttttgtggggctggaacggcgacgcgtccaaaacctacggcggcgcgtcctatgcctccggcggtgtgccggacatcggagccgacaccatgattacgaagtgttccggcgtttccaccgatttcagcaagattgttccgggggaagccgtctggctggaaggtcatatcggcgtttacatcggcggcggaaaggtgatcgagtgttccccggcgttcaaaaactgcgtacaggtgacggcgtgcctgaacatcggcgcaatctccggcatgaacgggcgcaggtggaccaaacacggcaaattgccgtatatcacctatgacaccgcaggcgcggccacaggcggcgcaggaacggcgcagaagcccggcggggcctccgacacctccggcgcgctggcgttcgccgtgggcgacgtggtgcagtttacgggcaacacgcactacaccagcgcggcggcggcaagcgggaaagcctgtaagcccggcccggcaaaagtcaccatgatttcaaagggcgcgaaacacccgtaccaccttatcaagcaggcgggcggcgggtccacggtttacggctgggtcaacgcggcggacgttcagagcgagacggacgcggccattgacaagctggccgagttgggggtcatcaactccccggactactggaaaaacgccgtcgcaggcggaaaggtggcctatctggatattctgttcacacaggccgcggcgaagattacaaaggccgggccgcgaaccgcggacgtgaaatcgggcgttgacgcgttggtgaaagccggggtcatcaacaccccggaatattggttgcagaactacgggaaattgcagagccttgacctgcttctttgcgcgctgggtggggctgtgtaaaaacgaaaggagaaacgaattatgaacatcattcaatttctggccgcgaattgggacagtgttcttgtggtcctcgcgttccttgtgctggttgtcgtgcttatcaagcgcggagaaacaaaggttttgaagaagattctttttaatcttgtcacacaggcagaaaagcagttcgggagcgggacgggcgaattgaagtttgccgccgtcgcagactggatttatcagagaattccggcggtgctgaaactgctgttcacggaaaaggatattgcgactatgattgaagctgtattggaggaagcgaaaaaggcgtggggaaccaacgagaatttgaaagactacgtggaaaccccgcccgccgaaaccatgctggcaatcggaattaaacaggacgcggaagaggaagcagacgcgcccgcggaaagtgaataactgtccgattcggacagaaacgaagcccgccgggggcattccccggcgggctttttttgtttgcgattataaattttcaaggaaacagggtatatgatcgaatgccgcggaaatgatcttgtcaatgtcgatcatcatcttgcgcgtgtccgcgccgcacccgtcatgcgcagaaagaaccttttctttccatgcgtcaatctgcttttctaactccgaattttccataaacaacgtcctttctttattggggcgggcggcggcttgcaccgcccgcctttatcttacgcgctgaccgtggacacgtcaagccggaacgtgaggtcaaggacctttgcgcgggtggcggcgttgttccgaacggccttttccagcgtggcccgaaccccggcgggagcaagagacaggccgtaggcaatcaggcgatcttccgccgctttcagcgcggcgcgggcggcgttcagttcttcttcaagcccggcggaagcaatgagcgcggcgcattcggcgtttgccttttcaaaggccgcgtcatcctccatgcagtaaaggaattcgggaacggagccgtcgggattgacaatgccgttgtcggcaatgaacttcttttcgatggcctcttgccgggattcgacttcctgcacgcaggctttggcgaccatataggcccgctggaacttgtttgcagttcttttcatggtcattcccctttcttgcggcggcaatggaccgcggcggcgataatcagtttcacaatggcaacgacgatcaggaagattccgagttttgcaagcatggttgacagttcagaagaaaaagtgtattctatgggtgggcggtgaacccgcccatagaatacggggtttcggcttacgtgtgcttatcaatcaggagtaacgcaagccctaccagaaagtccacgattgcggttattacgatggtgcgaacatcgacccgcgatttcgtgggctttttctttttcttcttcaccgtttcaccccctttctgtttattattatactcacgtgagtatgaaaagtcaataggaaaacgtaaagtttttcaaaaaaattgcgccgccgtgggaggttcggcggcgcggggtcaatcggtattttcaatcaggcgcatcacacgcaaggcgagatcacgggcgggcgcgccctccacgctatcagcataacggcccagcacacccagcaagcgcgccttgtacgcgtcaacctccgtcggtatctttacgccgtagcgggtttcgtagcaatcgcggcagaggtacggcgcgtttgcggtgatcgccccgttgctttcgtcggtgtactgatacgcgcggcaactgcaaaggggctttccacaggattcacaacgcccggagaacttgcgggagcgggtgcgggccgtccgggtcatgcggtggggcttgctggacatcaaaccaccgccctttcgcctgcggcggggacgcgaaaagaagcgatctccgccgcctttgcaatatccgcgttcatacggtcaaacataacggaaagagaaaacgcggggtacttccgggaattcatgggataggtgctataaaggcccacgtagtcacctttattcgtgttctggcgcgcgccgccgcaattattgtttacagtagcggtgaacacggcgtaatcggccagaatgtcaatcagttgtgcgcgggtgtaacccttgtatgatttcatcgaactatcctccattcatcaaagaggggcggcggcttgcgccgccccttgttagtttatccggccacgaacacgcccagcggagagccacccgcagaccgccacccgcggcggtgaatgtcggagaggcggacccgttcgggacggtccgggcggctgtcccagcgaatcagggcaaacacgccgccacggaagaaacgcccgtcggggacatcctcaaagccgatcaccgttccgccctcaacgggatagcaggcaccgcagacgcattcgacgcgctggccgatcattacaattaccgtcccactgtcggcgggctgggaaatagtgatcacgttggagggggccgcgtcctccgcgggaacggaaacggcggattcctccgcggttggggcctcttcctccggctgaacctcacgttcagcgcggaacgtgggagccatagaatagcggtccggctggatatattcgccggaatcatcgaagcgaatcttggaacggcgggattcgcccatatactcataagaaacggtttttgcggtccgtccggtgatcttgatggagaaaatgcactcactgtcgcaaatgctacgtgtgaagtattccttgccaatctcaaactttttcatgtgattacctcccatatatgaaaccagaagttgaagtgttgtcgttaccgtgtcggcccccttttcgtgtcggcccgtaaggttggcccccgccgtattctttatgccccggcaggtgggcgggttgtgcttccctctttctgtcttttattatactcacgtgagtatgaaaagacaagatggaaatttgcacaaaaatactcacgtgagattgtgcgctttttcatacttgcgtgagtattcaagaagtgatataatcagcggagaaaggaggcggacacatggaaaagaaaaagtatgcgtgcaacacacgggcgaagaacaagtggaacgcagaaaattacgaccgcctttacccctatgtaaagattgggaaaaaggcgatctatcaaaaagcggtagaagctggcggctttgaaagcctgaacgatttgattgaaacggcgacggacagaatcgcggcggaggttttggggctgaccccggagcaatacgcggcggaagtgcaggccgcggcggacgtaaaaaagaaatcagaataagcaaaagaacggcgggcataattcaatgcccgccgttctgctttattcgttcaatgccgcgtgctggtaaaagtcgtcgcagatttccggtatattgtcggaatcaaaattttcaaaattgatcttatcaagcgtatctttgtagaatgtcactttcataacggtttcggttgaagtgttgccataagcatcaacgagcgggaaagaccaaaaaagagaaacgcgcccgatgtcgtcgcgggattgcagagattccagaatgtcggcggcctgcaacagcattcctttccgaaccatattcgaggttaaattatctttcccggaaagatagatgtccacaaaggagccgtccgaactttccccgacgctggccgcgtcgtaaatactgacatcttctttttcggcgttggccgcggtgatcgcgtcgtcaactgcctgttccagcgtggccggagtttccggcgcggcggggtcatccgtgggcgcgggttctacgggagccggggcggggttcgggtaaagttcctccccgttgtattccacgcggtcaaccacgccgtcggtgtaatagacatcatacacgtatagcccggcggaaacctgacaatgcccgtcgtcacccgcctttctggtgacatttgttacttttgcttccatgccgcaggacacaaggataatgaatacttcatcggcctgttccggcgtgattgccataccggaagaaagcgcgctttgcgaatcggcgtaaaagtcgtactgttcggacaattcggcgtgcttgggcgtgtcgtagtccgcaagacacccggagagggagagggcaagacaggccgcaagaaaaagagaaagcaatcttttcatgtgaaatcctccatttcgccgcccgctgtgtcgggcgacccgtatttttgcgggtttgaatccattgaaagcattggattctgacctttaacacaattatcggcggtgtgcgtgttaaagtcaagaaaaatgcgaaactctaacacatgtggaggaacaaccgatgaagatatatgactataaagggcgcaaaaatctttgcggaaaccgcgtaaaagaagcccgcgcccgcctaaaaatcacacaagaggaccttgcggcccggttacaggtggagggaatcacgatggagcgggacagcgtaagccgaattgaaattggaacgcgttttgtgacagattatgaacttgtcgttctcgcaaaggtcctaaacgtgtctttggaatggctgacggagcaggacgaaaaataaatacttgcgtgagtatgaaacaaatgctataatatgaccacaacggcggaggaaaccccgcaagaacaagggagaacgaaagaaacccgcccggattgggcgggtttctttgctttgtggaggttgtggcatgggacacgtatttagccatttatcaaaaacagaccgttataaaattgaagccctcttgaatcaggggcatacaaaacgggaaattgcggacgaattgcacgtgcatatcagcacgatttaccgcgaaatcaaacgcgcccgctggcagtatttggacggtgatacatggattacagaagatcgctataacccggacggggcggaaaagcgataccgcgaaaacctcgccgcaaaaggcgcaccgctgaaaatcgggcgcgactttgagcttgcggaatacatagaacgaaagattatcgtggaagatcgttcgcccgccgcggcccttgccgaaatcaggttggaagggcggacgttcaaaacctcgatttgcgtaagcacgctttacagttacattacaaagggcgttttcctgtccctgaccaacagcaatttgccggagaaatcgaagcgaaagcgagaatacaagaaagttaaaaagaccggaaagcgtgcgtcgtatgggaaaaatatcgaaaaacgcccggacgaagtggaccagagaagcactttcgggcattgggagggcgacacggtttacagcaaaaaagacgggtcaaaagccctgtttgtgctgacagagcgtttgacccgatgggaaatcattacaagaatcaaagaccggacggcggaaagcgttataaaggcaatggaccgcatagaacggaaattcggtgcggaccttttcgcaaaggcattcaagacgatcacattcgacaacggcggggagttctctgacgtgaagaggttagaacggtccgtggtgcgaaagggaaagcggaggacagcggcttactactgccacccgtattcatcgtatgaacgcgggtcaaatgagtgccagaacaaaatgattcgccggaagtttccgaaaggaaccgatttcggaaaagtgtccgcggcggagattgaggcggcagaagcatggatgaacaattatccgcgtgaaatattgggatggaaaacggctgaaatctgcttccgggagtgtattgccgcccttgcttgatgccctaaaaataaatttttatatttttttcgcatttactattgacatttccgctttctttcccaaacgcctcctgctggcgggatctttcagaggcagagtctttggagcgaaggaggggactcctgcctggagacacagaaaatcccgcttgacaaatgggaagagaggtgtataatgcaaaccaacaaaggcgcagacggagacagcatagagcgcggagagagccagtcagagagttcccggtaggtgcgaggggcctggttccgcagcttgaaatttcctctcccgagccgtccgaggaacgctccctccgggggcaagtagagcggaaccgggtcctcccgttacagaggctgggtattgctggatacccattgaggccgcactcgcgagggggcggtaaaaagaggtggtaccacggggcacgccccgtcctctggcggcagtcgccagaggtttttttgtaccctttttcaaaaaacggtccccgccagggcggttttctctttaccttcacgctttgatgtgctaaaatcactttaaaccattgaaccacgggcgtccctttgcccgcggcgcgaaaaaggagtgacactatgcccaaagcggaacatcagaggggccgcagcatggccctgtacgagacaatcctgaagctgaaggacctggacgagtgctgccgtttttttgacgacctgtgcacccccaccgagctgcgctccctggagcagcggttcgacgtggcggtctacctccagcaggggttggtctacctggacatcctggagaaaacgggggccagcagtgccaccatcagccgggtccgccgggccatgctggacaacggcgccggcggtgtgatgcaggacgtcatcatccgggagggcctgggagagcccaaagcagatcctgagccgtgacggtgcgggaagccgtccggctttgcggggaagaacaatacagaaagcagggaacagattcatgaaacaactgatgttgggcaacgccgccgttgcccggggactttacgaggcgggctgctgcgtgatctccagctaccccggcacccccagcaccgagatcaccgaggaggccgccaaattcgacgatatttactgtgagtgggcccccaatgagaaggtagccatggaggtggctttcggcgccagcctggcaggaaagcggtccttctgcgccatgaagcacgtgggactcaacgtggccgctgacccgctgttcactgtggcctataccggcgtcaatgcgggcatggtcatcgcggtggccgacgacccggggatgcactcctcccagaacgagcaggactcccggcactacgccatcgccgccaagctgcccatgctggaacccgccgactccgccgaggccctggccttcaccaggcgggcctatgagatctccgaggagttcgacactccggtgatcctgaagatgtgcacccgggtggcccactcccagtccatcgtggagaccagcccccggaccgaggggccggagcgtccctatgagaagaacatcgccaagtatgtaatgatgccgggcaatgccatccgccgccacccggtggtggaggaccggatgcgccgcctggcccagtacgccgagacctgcgatctgaaccgggttgagatgggggacaccaagctgggcatcatcacctccagcacctcctaccagtatgtgaaggaggtctttggggaggaagcctctgtcctcaagctggggatggtccaccctatgcccgagggactgatccgggacttcgccgccaaggtggaccgactggtggtggtggaggagctggaccccatcatcgaaaactactgccgtcagctgggcctaaccgtttccggcaaggaggccctgcccctggagggggagttctcccagaacctggtggccgccaagctgggcggcgcggtacataccggcaccgccctggaggacgccatcccgccccgcccgccggtgatgtgcgccggctgtcctcaccgcggactgttctacaccctggcaaaaaacaagtgtaccgtgctgggcgacatcggctgttacaccctgggggcggtggcccctctgaacgccatggagatgaccctctgcatgggcgcctccatcagcggcatccacggcttcaacaaggcattgggggagaaaagcgaggggaagacggtggccgtcatcggagactccaccttcatgcactccggcatgaccggcctggccaacatcgcctataaccagtccaactccacggtcatcatcctggacaactccatcaccggcatgaccggccaccagcagaaccccaccaccggctacaacatcaagggggagccggcgggaaagatcgatttggagcagctgtgccgggccatgggctttgaacgggtccgggtggtggacccctatgacctgaaggccaccgaccaggcggtgaaggaggaactggccgcccgggagccctccgtcatcatcagccgccggccctgcgctctgctgaagtatgtaaagcaccaggcccctctggcggtggatacggacaagtgcgtgggctgcaagagctgcatgcgcatcggctgccccgctatctccatgaaggagggcaaggcccatgtggacaacaccctgtgcgtgggctgcggcgtgtgtgaacagatgtgcgcatttggtgccttccagagcaccgagaaggagggctgagccatgaagaccaagaatatcatgatcgtaggcgtgggcggacagggctccctgctggccagcaagctgctgggccatctgctgatggagcagggctatgacgtaaaggtgtccgaggtccacggcatgtcccagcggggcggcagcgtggtcacctatgtgcgctacggcgaccgggtaaattcccctgttatcgacaagggggaggctgactacatcgtctccttcgagctgctggaggccgcccgctggctcagctatctgaagcccgacggccagatcgtcacctccacccagcagatcgatcccatgcccgttatcaccggcgcggcccagtacccggaaaacctggtggagaagatgaaagcggccggcgccaaggtggacgccctggactgcttggctctggccgaggaggcaggctcctccaaggcggtgaacatcgtgctgatgggccggctctcccactacttcgatctgcccgacgaggcgtggcagaagtccctggaggtctgtgtgccttccaagttcctggagctgaacaagaaggcattccagctgggtaagaacgcctgaaaggagggcggagagatggcggaggagcgcgtccctttggagatccgcagggcagagccggaggacgcggcggagctgctgtccatctatgccccatatgtggaggagagctgggtgacctttgagtgcgtcccgcccacggtggaggagttccggcgccgcatggaggaattttcccggcactacccctatctggtgtgctgccgggcgggggagatcctgggctatgcctacgcccaccgccacatggagcgggaggcctaccagtggaacgcggagctcactgtctatgtgcgccggggtcgggagggcttggggatcggcaccgccctctacggggcgctcatccccaagctgcgggaaatggggctggtcaacctgtacggggtgctgggactgcccaacccgggcagtgaggccctgcaccgccacttcggctttacccggcagggactgtaccctcggatgggattcaagctgggggagtggcacgacgtggcccagtacggcctgcgcctcacccccccggaccggccgccggagcccctttttcggacagaaggggggacgcagggatgatctggaagtatctgctgcggatctggggctgggtgtgcctgctggcagccgccctgcatggggctttgaccctgtatgcggccgctgtgccgtacaatatctatcagccgggaagcaccggactggcggagtggctgggcatggggctgatctcccacggcctggcccatgtgatggcccgcctggacgagctgggatgatcgcagggggtccataaaaaatcaggacagaggggggacatggatgaaatttgtcattgtcatagagtggcttttggggctttggggagcatttgccctctatgtggctctggtgtgcggaattgctttttttgatgcgagcacgccggaaaatctggccatgttcctgttgagcgggtgtgccgccctgttttcctttgctctgatcgcggtgctggaactgcttcggaaaaagcagcagacatcgcctaaataaaagccgagaatttctttgactcttttttgcatgaaagagaagaaatatgaaaacgagagagggatgattccattggaacgctattatcagccggagatcgagactgcgtcccgggaacagatcaaggcctggcaggacgagcgcctggtaaagcaggtccagcatgtgtgggacaacgtgccctactaccgcaaaaagatggaggagaagggggtcacaccggcggatatcaagtccagcgacgacctgtacaagctgcccttcctcaccaagtctgacctgcgggacgcttacccctacggactggtggggatgcccctgaaggactgcgtccgcatccagtccacctctggcaccactggcaagcgggtggtggccttctacactcaggaggacatcgatctctgggaggactgctgtgcccgagctatcatggctgcggggggcaccaatgaggatgtgtgccaggtgtcctacggctacggactgttcaccggcggccccggcctcaacggaggcagccacaaggtgggctgcctcaccatccccacctcctcgggcaacaccgagcgtcagatcatgttcatcaaagacttgaacgccaccatcctgtgctgcaccccctcctatgccgcctacatcggcgagaccatgaaggagatgggaatgagtccggaggagatccccctgaaggcgggcatattcggtgcggaagcctggtccgaggagatgcgccaggacattcagaataccctgggcatcaaggcatatgatatctacgggctcaccgagctgtccggccccggtgtctccttcgagtgctccgcccagagagggatgcacatcaacgaggaccacttcatcgctgagatcatcgacccggacaccggcgaggtgctgcccgagggcagcgagggcgagctggtattcacctccatcacaaagaaggcgtttcctctgctgcgctaccgcacccgggacatctgcaccctcacccgggaaaagtgtccctgcggccgcacccatgtgaagatgtccaagcccaggggccgcaccgacgacatgctcatcatccggggggtcaacgtattcccctcccagatcgagacggtgctcctcaattacggttatcccgccaactaccagatcatcgtggatcgggtccactccaccgacaccctggacgtgcaggtggagatgaccccggagatgtttaccgacaaggtgggcgaggtggaccgccgccagaaggagttggtggacggcctgcgctccatgctgggcctgtccgccaaggtcaccctggtggctcccaagtccatcgtccgcagcgagggcaaggcggtccgtgtcatcgacaagcgcaagatctgactgatttgacaggagggaagagttatgagcgtcaagcagctttccgtgttcctggagaataggcccggtgccctgtatgggatgaccggtatcctctcccaaaacaagatcgacatgcgggccctctcggtggcggagacccgggatttcggcatcctccgcatcatcgtggacgacccgtacaagacggccactgtcctgaaggacgcgggctatgtgtacaacatcacccccgtgctgggggtggcgatccctgacgtgccgggcggattgaacaaggtgctccaggtgctcaccgatgccaggatcaacgtggagtacatgtatgcattcctggggggcaagaccgaagccgcctatatgatcttccgggtagaggacaacaatgccgcggcggaggccctggcctcccggggcatcaagaccctggaggaagcggatatccagcgaatgtaaagcgaaacagctttcaagaaaaaggacagaccgcgcgccagccggcgcgcggtctgctttttcagatccggtcgtagaagggggagactcccttggaggcgtcctggccaaagcgggaggagcgggggaccagatccaccgtttttccctccagccaagggcgggcggccccggcaatggcggaaaagacagcgtcctgctctccctcctggtccactaccaccagatagctgggctccatctcaccctcccggaccatcaggcgcaggtagagtgcctttacagctgggagctcacgggcagcggagcagatggcctccaccatccgctccgggtactccgccgggtcccccagcatgactcgggtatccttctgaatcacctgccggaccggtggagtgccctctgccttctgccgggccaggcgggccaccgtctcccggtccagggtgaggctgtccccgaagggatcgaccacaaagccggcggcccggctgtcccgctggagcatagaggcatagtcgtcgaaggtgaggaccagggtctgctggtcccgggggccgcacagcttccgcagctccccccagttggtgaaggcgggaaagaagggacggccctcctggctggagatgagctgaaactggatggcggtgttctgctccagtgtagtctggccggagacagcggggggcggcgcgggggtgaggaccacaggcgcgagcagatgggcctgggtcatgagctccctcagcgcccggtcctggttggcgggcgtgttctcccggtggagggcggcgagggcttcagacagacggggattgacgatgggctttgtgacatcaaccatggcggtgacctccttgtgtgtcatgggtagggtgcggggcctgacctgcttgtctctgcttggagcctcaggaaatctcccgttcaaagatcacctgatagcactgggcgggacccacaccccgcccctcacagaaggggatcacgatctgcttgaatcgccacccatttgctgcctcgttttcgattacgtccttacaggcatcgaaggtagaccctgctttcgggggacgggaaatgatcccctgggtattccaggccacagggacctgtatgaatttgtactcgtactgcttcatcaagatgacctccctgcgggctttcttgcccgctgctttatgtactgacggcctggatctctccggagaatggaagaaaaaggccccgagtggctacagccccagcaggcgctgggcgttgccgcccagaatggcgtcccgctcttctggggagaggggcagggcgcggatagaggccacatcggcggattggtccccccaggggctgtcggtgccgaagaggaggcgctgggccccaaattttcggacaaagcggacaaactgctcctgttccatcatgtgcagctggtcctccgaaaaagggtgtccctccaggggggtgaggtcgccgtaggaaaaggcggtatccagtagcacgctggactgggggagcagggcctctacctggtcccactggcgccagcctcccatgtgggccaggatcaaggtcaccgggcccacctgttccagggcgcggagcaccatctccgggtcgcagtaggtgggggcggggatgccgatgtcgatgccggcgtgggtgaggaccacgagccccagctcgccggcccggtccaggatgcgcagatagcggatatcgtcgaaccgggtggcctgataggcggggtggagcttgatgcccttcaaacccagggcggcgatccgagccagctctcccctggggtccggacagtccgggtggatgcagccgaaggagtagatgccggtcccgcggccccgggcgttgatctgagcggcgctctcgttgacatgggccacctgatgggggttggtggccaccggcaggactacggagcaatcgatgcccgcccgggccatggaggcggccaggccggcgttggtggcgtcggtgaaggcccgggtatgacaggcaccctggagcttgcggatggtgggggccgcaagcttgtcagggaaggtgtgggtgtggatatcaatgaccatggcggtccttcctttcctgggaaatgatgccgaagccaagggagcgcggcatgccggtcccaagcataccacatttttcgctcggaggcaacgacagcccgttcgaggtccgtttatcttaaaactccaaactccgctggggttgaagcggcggtttcgtattgccatacagaatcggctgcggtataatcagggcggcaatcaaaagctgcggaggtatgtccatgaaaacgatctatgaaaagtatatggcatcgccgatcgacaaggagcttttatgcttggagcatggcgagatcacagagccatatttttgctaccctgtcaatgcagagccgataggatttgaagggtgtatcctgtactgctttttgccggagtatggagagatggtatttgcctgcgacccggaaagctgtgcagatcggaatgtatatccactggcaaaaaatttcgaggattttctccgtttgatcctggcgtgcggcaccgctgatccagtggagcagatcgtttggatggataaaaggaaatttgaggaacacatggaacacgaagaaaaaattttgacacaggagcagagggcggcggtacagcagcttcaacgcgaaatgggtctgctgccaatggaaaccccgtttgaatatgtcaaggcgatccaaaaagactttgatgacagtaaaatacagtacagcgatgaatattacgaggtgactggcagagaggccccgaaagaaacagacacgcccaacaaaactttattggaatttcagactgtcacagttgaagttcgcggccaaaatgatagagcctgacaacttctgatctatctggcagttacccgataagggcagctgcggcttgactgttttgtaaggagcatttccaaaactgcttctcagctaaaaagaggaaaaggggaccgccccggcgggcgggggatgggagtcacagcagcagacaaagaggacgggcttcgcggaccgccccggcgggcgggggatgggaggagcggtgccggactgcgttccggcccttgccaaatggcgggaaagcatctataataccagtaaaacaacggcagaacgtctgccgcgatggagggaacgacatggctctggatatgaagtattttgaggagatggaggccaagatcccaaaggggaaggtccgcacccggtttgccccctctcccaccggctatatgcacgtgggcaatctgcgcaccgccctttacacctggctcatcgcccggcaccatcagggcacctttatcctgcgcatcgaggacactgaccagactcggcaggtggagggtgccacagaggtgatctaccgcaccctggcggagtgcgggctggaccacgacgagggccccgacgtgggcggcccggtggccccctatatccagacccagcgccgggacacctatggaaagtacgcccggctgctggtggaaaagggacacgcctactactgcttctgtgaaaagaccgagtcggaagaggactccggccagttcgaccgggcttcggacccctgccgcgccctgagccaggaggaggctcaggcccgggtggacgcgggcgagccatacgtcatccgccagaagatccccagcggcgggaccactaccttccatgacgccatcttcggggacatcaccgtggagaacgacaccctggacgaccaggtgctcatcaagcgggacggcctgcccacctataacttcgccaatgtcatcgacgaccacctgatgggcatcacccatgtggtccggggcagcgagtatctgtcctctgctcctaagtatgatctgctctatcaggcctttggctgggaagtgcccacctatgtgcactgttcccccgtgatgcgggatgcccacaacaagatgtccaagcgccacggggacccctcctacgaggacctgaaagcccagggctacctcacccccgccatcctgaactatgtggccctgctgggctggtcccccagaggagaactggcggaacaggaagtattctctctggaggagctggtggccgcctttgatctggcgggtgtatccaagtccccggccatctttgatattgagaagctcacccacttcaacgccctgtacctgcgggccatggagccggcggactttgcccgggcggcagagccctatatccgccagagcgtgaaagacccggcgctggacgcggcggagattgccggcctgctccaggcccggtgtgagcggctcactgacatcccggagaaggtggacttcttcgatgccctgcctgactatgatggggctctgttcaccaacaagaagtccaagaccgacccggaagtggcccgggccatgctggaggccgccatccccgccctggaggggctggacggctggaccacggagggcatccacgacgccctcatcgctctggcggagaagctggcggtgaagaacgccaccctcatgtggccggtgcgcatcgccgccgccggaaaggcggtcactcccgggggcgcggtggagatctgccacgtgctgggccgggaggagactctgcgccgcctgcgcctggggctggacaagctgcgataagatccacctgtccccggcggcctgtgccgccggggacattttttccgaaacaggaaaaaacaggctgttcaaggctgggccgggatggtataatagcggagaaaacacatgcccgcggcagccgggcaaccacagaatggaggaatcgagatgaaatgccccttctgcgcctatctggagagcaaggtggtggactcccgtcccgcggacgagggagccagcatccgccgccgccgggagtgtctgtcctgccataagcgcttcaccacctacgagaccatggagagcctgcccctgatggtggtcaaaaaggacggcagccgccagagctttgaccggaacaaggtgatgaacggcctgatccgggcctgtgaaaagcggccggtctccttcagcaccatggaggagatcgtcaacgagatcgagcagaccctccagaacgagatggagcgggaggttagctccgccgagatcggagagctggtgatggagcggctgaaaaaagtggacgaggtctcctatgtgcgctttgcctccgtctaccgccagttcaaggacatcaacaccttcatgcgggagctgaacaagctgctggaagataagtgagcaatccggccccgggaccacatggtcccggggctcaaattgtcgcaaaaggccgtcgggtcttttgcgacgaagggctgcatgacagatgaggcctatttttgcaggaaaaagccgcctcatctgtcatgagaggtgtcattttccagaagcatgtcccgggaaataatgctttttgatttgatcctgtcttccacggacgacagaactctttggggccccctctgggggagatttttcactagcggaagcggggggccgagccatcggcctcccgctttttgtgccgcgccagggcggagcttaaaggaaccgcttcatctgctggatgttctgttcctcggtgtgcagcaggcggctgcccagggccagcagctccgggtccgccttgccggtgtactggtggatgcgccgggtcatctccacagtgcccatggtgctcccctggatcatcagctgagccagcttggaggtggtgtggtcggcggcagtgcgggccttgagcatggcaccggacatggcccggacagccagacccggggtatggagccgggcaccatgcttccgggcataggcctgtgactgggcggcgatggtccggtattcctggagctggctgttcagggcctggcccatggcccggctctggggcagggacagcacctgggggatggcgctcacccccatagccgcgtttttatgaatgaaagacaaaaactgctgatcgtgatccatgaaatttctctcccttcctccatattatctgaaaaattctgcaaaatatacgagaaagagcagggattttgtaaaaatatttgagatcctgtccttgatggtcggagcggggggcgctataataaactatctttttcccggggcacgcgaggcgccggagtcgaaaggggcggagaatatcgtgagtatggaagacatccggctggagcaggggctccacgaggagtgcggtgtattcgggatctatgacccggagggcagctgcgcccagaccacctattacgggctgtacgccctccaacaccgggggcaggaggcctgcggcatcgcggctatcaatgaccgggagcagtccttttataaggacgtggggctggtcagcgaggtcttcgaccgggagacccttcagcgcctgaatgggaccatggcggtgggccatgtgcgctacgccaccaccggcgctggggcgcgggagaacgcccagcccctgaccatcaagtatgtgaagggaacgctggcggtggtccacaacggcaatctggtggacgtggaccggctgcgggcccggttcgagtaccagggggccatcttccacaccaccagcgactcggagctcattgcctacgccattgcccaggcccggctccacgggcccagtgtggaggacgcggtgtgccgggctgtgggggagctgagaggggcgttctccctgatcgtcatgtccccccgtaagctcatcgcctgccgggacccctggggcttccgccccctgtgcatgggccggaaggggaaggcggtgctgttcgcctctgagtcctgcgccatcgagagcgtggggggcaccctggagcgggaactggacccaggagagatcgtggtggtggaggaggggcaggtgcgctccatccgagacaactgcaggggccagtcccacatgtgcatcttcgaatatatctacttcgcccggcccgactcggtgatcgccgggcagtcggtccacgaggcccggatgaatgccggccgtctgctggcccgccgccatccggtggaggccgacctggtggtgggggtgcccgactccgggctggacgccgcccggggctatgcccaggagagcggcatcccctacggggtgggctttgtgaaaaaccgctacgtgggccgcactttcatcactccagaccagaccagccgggagcaggcggtgcgcatcaagctgtctgccctgcgcagtgaggtggagggcaggcgggtggtgatgatcgacgactccatcgtccggggaaccacctgccgccagatcaccaacctgctgcgggaggccggggcgaaggaggtccacatccgggtgtccgcgccccccttcatcgccccatgctactttggaaccgatatcccggaccgggaacggctcatcgcctgccagcattccctagaggagatccgggagatcgccggggcggacagcttgggctatctgcctctggaggacctgcaccagctggcccccaaggcggcctgcggcttctgtgacggctgcttcactgagcgctatccggtggacctggagtgaaaaacgagcccgcgcgcctgcagtgttctgcggacgcgcgggcctgttcttttttggtgggttcttgctgacaaggagttcagcctgtcacttatcctggggctgtggatttctggtggggagcagggagttgatgaggaaggccaccgttactcccaccacagtctccgacacccgggcggcggcgtagtagtagcgctggatgccggacacgtcaccggaaatgagcatgacgcaggggaggatacaggccatgccgcaggccgcgggccggttgaagagcatgcaaagccagatcccgcacacacaggcggctcccagcatcaggacgatgcccacccagtgggacagcaggggctccaggagcagcatagccacccccaggatggcaccgatgaacacccccacaaagcgggagagcccaacctggagggtctgctccagggagctctgcatgcacacgatgcaggcgatgcaggaataggtggggcccacataggccagcaccccagggtagctctcgttatagaggaggccgaaagggacaaagatcaggtaggagagcatcactgccacggcggtcttagtggtgcgcatcccgatatgtgggaacttgaactgtttcatggggcagacctcctgctgtgtcctgttgtgccaggccccgcagccggggcgccctgctaggatgcccggaaagtctgagcagtaacaggggagagggtagagtttgggaaacaactcgattgtatcctgaggcggggggaaagtcaagccgtccacgccctgtacccttttcccctatggaccggtcttcaggacagaaaccctccccgcgtccattcagatgagggggatctgctccaggtcacacgggtcaataagcagaaggcgaattatcattcgctctagtgatctcaatcacttctaattgcagatgatatgtgttttcctctccatccagatcaactgttttcagctcaaaccaaagaccatcaactaaattatcaatatcatcagggataagaatgtccccggttatttttcctatatcctcggaaatatttattgcgcctcctgttttatcttcaactctattggacattaaaatattctcttcaccatctgatgtaagataaatggtagctgagtatgaagcaatatccgtaaacttatcttttcttgtttccaaattaccgccataacagatatcttcttcagcgtctaaaacgatgaccccatttgaaacagaaataaattcattttccccgctaaaagaatagactgctagcggctgcccttgcctgctttgagaagaaatactgcaccctgcgagcagcaaagcgcagaatacgattgccatcaaaactggtgttacctttttcatgacaccacccacttaaaattgtgatttatccctttttgctttcattaacgggatgaaagggggaagtcgtcctctgccgctccaaagggaacgctccctccgggcaggaaaaaattccccgtgccaggggcacggggaatggatcacttgcggacagcggccttcacccgctccacggcttccactgtggcggcggcgtcgccaaaggcggtgaggcggacgtagccctcaccgctggggccgaagccggcgccgggggtggtggccacattggcctgatccagcagcagatcaaagaagtcccaggaccccataccgccggaggtcttgagccagatatagggagcgttgaccccgccgaacacctggagcccggcagaggtgaggccctcccggatgacctgggcgtttttgcggtagtagtcgatggaggcgcgggtctgctccctgccctcgggggtgtagatggcggcggcgccccgctggaccacataggggaccccgttgaacttggtgcactggcggcggttccacaggctgttcagcttggcaccgtcccgctccagctccatggggaccacggtgtaggcgcagcggttgccggtgaagccggcagtcttggagaaggagcggaactcgatggcacaggttcgggcaccctcgatctcaaagatgctgtgggggacatcctcctcgcagatgaaagcctcataggcggagtcgtagaggatgacggagccgttggcgttggcgtagtccacccacgccttcagctgctcccgggtggctaccgcgccggtggggttgttggggaagcagaggtagatgatgtccaccttctcacgagggggaacaggggtaaagccgttctcctccacacagggcatgtagaccagcttgttccatcggcccagctcctcctggtagtcaccggcccggccggccatggcgttggtatcgacatagacagggtacaccgggtcgcacaccgccaccacgttgtccagaccgaagatgtcgccaatgttgccgcagtcgctcttggcgccgtcggagacaaagatctcctccggcttgatgtccacgccccgggcggcgtagtcgtgctgggcaatggcctcccgcaggaagtcgtagccctgctccgggccatagccgtggaagccctcgaaggtgcccatctcggtgacggcctggtgcatagcctcgatgacagcaggggccagggggcgggtcacgtcgccgatggacagccggatgatcttggcgccggggtgggaggcggagtaggcggtgatccggcggttgacctcggagaagaggtagctgccgggcagcttcagatagttttggttgatgtgggccatggggagacccctcctttgcagaaaaacttacaaactattatggcggaattttgccccgctgtcaatcctaacctccgggccactccccctcgaacacggtgacggcggggccggtcatgcggatgtgcccgctggctgtgtccagagacaggaccagggagcctccggggagaagggcggtgacctctggggggcacagtcccaggaagtgggcggcagccagggcggcgcaggcgccggtgccgcaggccagagtctcgccgctgccccgctcccacacccgcagccgcagctgatccccctccacggccacaaattccacgttggtccggtcgggaaagacggggtggcgctccagggcagggcccagcacgtccagggcgatctcctccgggtgggggcagaagaggatgcagtgggggttgcccatagagacgggcatgacggagtaggtgagctccatcagagggatggagatctggggaaagacggagggctcccccatgtccacctccacctgtccgatgccggcggggccggggaggagccggagggcacgcaggccggagtcggtgtccacctggaggctggtgcggcgggtgagccccttgtcgtacacatacttgcccaggcagcggatgccgttgccgcacatctttccccgcgagccatcggcgttgtacatctccatggcaaagtccccccgccggccggggcagacgcagatcaagccatccgcccccacaccaaagtggcggtcggagagccggaccgccagcccggcggggtcggggggacggcgggagaggcagttgaggtagatgtagtcgtttcccagcccctccattttggtgaagcgcatgccatcactccttttcggggcgcggcgggcgcgcccggtctggaggatggatatgcgccggcaggcgggaatatgccgcagctcagcctccgccctgggcgagggtccgccgggcggtctggaccagtgtgaggccctggtccatactccgcttctggagggtccggtgggcctgttcctcggtgagcccgtcccgctccatgagcagggccttggcacgagcgatgagatcctgctctaagggggagcggcggtggcgggtatagcgctccatccggtgtccgaactggagcagcagggagacggtggaaagggcctcctcacggcggatgggggtcggcagcttgaatatgtccgggtcagaacacagggccagctggtgggcgggccccaccatcagcagggagcagaaggggggcagatccccgcacagccactccgccgggccgtcggacagacgagtgccgcagaccacgcagtagatgggctgggcggcggcggcgcggcgaacctggctgcccgagtggcagatgaggcaggcggcggagccggagccctccagcagatcccggaatttgcggcagagggagtcactctcaaaggcgacgatgaccgtatccaatgggggggcttcactcctttcagcggggggacggggctcagtaggtgaccagatacttctccagttcccagttggacacccggatgcagtactcgttccactccttcatcttgccgtggatgtagtgagaggccacatggccgcccagcacgtccatgatgacggggtcggcctccatctcccgcagggcctcctccagggaggagggcagggcctggatgccgctggcggcccgggtgctgtcgtccatctcatagatgttgccggtgatctcagggggaggggtgaggccccgctggatgccgtccaggccggcggccaggcaggcggccaccgccagataggggttgcaggaggggtcagggctgcgcagctccacccgggtggactggccccgggcggcggggatgcggatgagggcggagcggttggaggcggaccaggcgcagtagcagggagcctcgtagccggggaccagccgcttgtaagagttgaccagggggttggtgagagcggtgaagcccttcacatgctccaaaaggccggcaataaaggagtaggccagggaggagagctgtttttcccccttctcgtcaaaaaagatattttttccgtcccggaacagggacatgttgatgtgcatgccggagcctgccagcccgaacagaggcttgggcatgaaggtggcgtggagtccgttcttttgggcaaggctcttcaccgccagcttgaaggtcatgatcttgtccgcacagtccagggcttcatcgtacttgaagtcgatctcatgctggccccgggcgcactcatggtggctggcctcgatctcaaagcccatctgctccagattcaggcagatctcccggcgggtgctctcaccgtggtccagggggcccagatcgaagtagcccgcctcgtcccgggtgagggtggtggcgtggccctggtcgtcagtctcaaagaggaagaactccagctccggcccgatgttgaaggcatcaaagcccatgtcccggctgcgctggagcacccggcggagcaccccgcgggggtcgcccacaaagggggttccgtcagggttatacacgtcgcagatcagccgggccaccttgccctgggcgggccgccaggggaagatggcaaagctgttcagatcggggtagaggtactgatcggactcattgatgcgggtgtagccctcgatggaggagccgtcaaaggtgatctggttgttcaccgccttttcaatttgggaggcggtgatggccacattcttcagctgtccgaagatgtccacaaactgcatccgaatgaattcgatgtcctcctccttcacgatgcggataatgtcttccttagtatagctcatggtgtgtctgcccctttctcaccgccccagggacggaaaatgtttggataaaacagtattgcactgaaggggggcggctgtcaagacttttccgaatgggagtgctggagaggacgagtaccgagcccgccgcgccctgcgcggcgggccggcaaatggatgtggcggacttccttggggcactttgcgggcaaaggcggccccgcgcggccacccggtctccgggaacctgccggcgccatctcacgggagagggatttgtgcgttttcgcaactcctgccccagagggccccaaaaaaatgggcgttatggtggaaatgaaaaaaacacttgcaaaaacttccggaaaggagtatgctgtcaaccagaaagcagtccggtccgccggtccgtttgggaacgaatgaagacaaagacgtcttgataggatgtctttgtcttttttgtttttgcggctgggagatcaggagcggcttggaattacggaaatggaaagggttgactggaaatgagtactgcgatcaccgagctgtttggcacaaatgtgttcagcgtctccgtcatgcgggagcgcctgcccaaaaaggtgtttgccgaagtgaccaatgtgatggagaatggcggcagcatcagcatgagcaccgccgatgtggtggccaacgccatgaagaattgggcgctggagaaaggggctacccactatactcattggttccagccccttaccggcatcactgcggagaagcacgactccttcctcaccgccccggtggagggcaagaccctgctccagctgtcgggcaagcagctgatccagggggagccggacgcctcctccttcccctccgggggcctgcggtccacccactacgcccggggctacaccgcctgggacatgacatcccccgcctttgtgaaggagatgtcctgcggcaccatcctgtgcatccccaccatctttgtctcctacaccggcgaggcactggacaaaaagactcccctgctgcgctccatggaggccatcaacacccaggccctgcgcatcctgcggctgttcggaaacaccgaggcccacaaggtgaccccctccgtagggccggagcaggagtatttcctggtggaccgggagaagtacctgaagcgtcgggacctgatctacaccgggcggaccctgttcggtgcccctgcccccaaagggcaggagctggatgaccagtacttcggcgtcatacgggagcgggtgggcgcctttatgaaggacctgaacgtggagctgtggaagctgggcatcccggccaccacccagcacaacgaggtggcccccgcccagcatgagatggcccccatctattctatgtgcaacttagcggtggatcagaaccagctggccatggagaccatgaagcgggtggcgacccgccacggtctggtctgtctgctccatgagaagccctacgccggcgtcaacggctcgggtaagcacaacaactggtccatcggcacagataccggggagaacctgctggaccccggggacacccccaatgagaacatgcagttcctgctggtgctctcctgcatcatgagagcggtggaccgccatgccgacctgctgcgccagtccgcctcctgcgtaggcaatgagcaccgtctgggtgcccaggaggcccctcccgctatcatctccatctttttgggggatcagctggacgatgtggtgagccagatcgtctccaacgcggactccatcaagctgctcacctccagcggactggataccggtgtgtccacggttcccgtcatcaagaaggatgccaccgaccgcaaccgcacctccccctttgccttcacgggcaacaagttcgagttccgcatggtgggctcctccgactccatcgccgacgccaacaccaccctgaacgccatcgtggcggagtccttctgtgaggcggcagacgagctggaaaaggcggcggactttgactccgcctgcaccaagcttattcacgatatgatgacggagcatcagcgcatcgtattcaacggcaacggctactccgacgagtgggtagaggaggcggaacgtcggggcctgcccaacctgcgctccatggtggacgcggtgcccgctctgctcacccccaaggcggaggctctgttcaccaagttcggcatctacaccaaggcggagctggaggcccgggcagagatcatgtatgagacctatgccaaggtgctgaagatcgaagccaagaccatgacccacatggcaggcaagcactatgtccctgcagccatcacctataccacccggctggccgaatccatcaccgccgtcaccgccgcctgtccccaggccgacctgacggtgcagcgggagctgctggagaaggtgagcctgcgcctcaccgccgccaccaaggccctgaacagcctgaccgagctggtggagcaggtggacgccatggaggatgtgaaggagatggccctggcctaccacgaccagatcgtccccgccatggccgcgctgcgcaagccggtggatgagatggaactgctggtggataagtccatctggccggtgcccacctacggcgacttgatgttcgaggtgtaaggaccagcagagatactgatgcatacagagccccggcgtctgacggcgctggggctctttccgttcaaagaaatctgccttttcagaacggcggaaaaagaaaaagattttcaatggcagagggtatttactccaggccaccggtctcgtataataaagcgtcccacccgagctatgaagcaggagggagacaggaggagaagccatgactgagcgggaaaagatgctgtccggcgcactatatgcttcagaggacccggagctggccgcggcccgcatccgggcccgtaccctgtgcggcaggctgaaccagacgccgccggaggaacgggaggcgcaagaggagatcatccgcaggctgttcgcctcggtgggggagaacagcaccgtcaatcctgtcttctggtgtgactatggcagcaacatcaccgctggggacaatttttatgtcaactacaattgtgtcatcctggactgcgcatccgtcaccttcggggacaacgtattcattgcccccaactgcggcttctataccgcaggccaccccctggacgcccctacccggaatgccgggctggagtacgccaggcccatcaccgtgggcagtgacgtgtggttcggaggaaacgtggtggtactgcccggggtgaccatcggctccggctcggtgatcggcgcgggcagcgtggtcaccagggacgtgccgcccggggtgctggcggcgggcaacccctgccgggtgatccgccgcctggtaccggaggaggggtgagcatgccgcagcacgtgcgggtggttccgccggacccggcctgggcggagggctatcgccgggagcgggccctgctgatgccagtcttcgggccgctgctggtggagctgcaccacatcggcagcacggcggtggagggactgtgggccaagcccatcctggacctcatgccggtggtcaccagcctggaggcggtggaccggctggacccggagctggaggccctgggctaccagtgcatgggggagttcggcatcccgggcaggcggtatttccgcaagggcggggaccatcggacccaccagctccacgtctttcaggcgggcgaccggaagaatatcctccggcatctggcggtgcgggactatctgcgggcctgcccggcggagcgggaggcctatggggcgctgaagcggtggctggccggacagtacccggaggacattgagggttactgcgacggaaaggactcctttgtccgggcgctggagcggcgggccctggactggtacgacgagaaacggccgtgatatgagatatgagggcccgccgcccctggcggtggccttgatataccagcttcgcagagagaaaggaggactatgggctctggcccatcataagcgccagcgcccttcccggcagaacgcccggggagggacgacgaggggaagggagtatcgagggggagcgccgccggcacagggggcgctccggttcggcggatgcccttccgcgccgctccgggcgcgtgacatggctcgaaatatgcgggcgaccgcaaaacagaggggccgtgaccggggaacgaggtgcaaatggctgcgagtttgtcctccatttcaattcaggaggatcatcattgcaatgtgtggtatcgtaggatatattggaacggaagaggcggcccccatcctgctggaggggctgcgccgcctggagtaccgggggtatgactccgcggggctggcggtgctggacccagagcaggggctccaggtggccaaggccaaggggcggctccaagtgctggccgacctcaccggtcaggggcagaagctgaccggacacatggggctggggcatacccgctgggctacccacggggcgcccaacgacgtcaactcccacccccaggtgagccagtccggccggatcgctgtggtccacaacgggatcatcgagaactatgcccggctgaaggagtttttggagtccaaggggatagccttcgtctcggagacagatacggaggtggtggcccagctgctggactactactatgaaggcgacctgctggacgcggtgggcaaggttctccaccgcatcgagggggcttatgccctgggcatcgtctgcgccgacgagccagaccggctggtggcagtgcggaaggactcgcccctgatcttgggatacggggcgaacttccacatgctggcctctgatgtcaccgccgtcatccagcacacccgggaggtgtgctatctggaggatggggaagtggcggtgcttaccgcccatggggcccaggtgtacaactccctgctccagccggtggagaaggagatctcccatgtagattgggagatctctgccgcggaaaaggggggctatgagcactttatgttcaaggagatcatggagcagcccaaggccctgcgggacaccattttcccccgcctgcgggacggggaagtggtgctggacgaggtctccctcacccgggaggagctggagaggctggaccggctgtacgtcatcgcctgcggctcctcctaccatgtgggggttgcggccaaatacaccctggagcggctgctgcgcatcccggtggaggtgacactggcctcagagttccgctactgtgaccccatcgtcacccggcgcaccctggccgtcgtcatcagccagtccggcgagactatcgataccctggccgccatgcgggaggcccggaggctgggagcccggctgctgtccatcgtcaatgtggtggggtccaccattgcccgggagtcggacgacgtgatctacacctgggccgggccagagatcgccgtagccaccacaaaggcatactccacccagctggcggtcatctatctgctgggcctgcgtttcgcccatctgctgggcacagtgggggaggaggagtacgccggcatggtagcccagctgaggcagctccccgccaaggtggaggagatcctgtccgacacagaaaagatccagtactacgcctctatctacttcaaccacgactccgtgttctacatcgggcggaacatcgactatgcggtggggctggagggctctttgaagctgaaggagatctcctacatccactcggaggcctacgccgccggggagctgaagcacggcaccatctccctcatcgaggacggcaccctggtagtggccctggccagttggggggacctgtttgacaagctgatgagcaatgtgaaggaggtaaaggcccggggggcggacgtggttggcatcaccacacgcagccatggggcggagctggccaagagcgtggacagcgccatccagatcccggacacccaccccatgttcctcccctccctggaggtggtgcccatgcagctgttcgcctactatgtggccctgatgcggggctgtgacatcgacaagccccggaatctggcgaaaagcgtcacggtggagtgacggcccggggctgcacagaaaaacaggagcgcgcgtctccttctgacgcagaggggggcgcgcgcatttttgcggaggaaaagagagagatgggacatctgctgtgtttttatctgctggagctggggatggcggcagcctggtgccggtgggtcatctgccgcgaggtagacctgcccgccctgctccgcaccgcccgaaccgtgtggagcggggaacggcaggtgctgggggagctgctgctggtccgccgccgctggacagagggggaggagacagagcgcttccgccaggcctggcgcaggatcgccctgcgcctgctcccgcctctgctatacctcaccctgggtggggcgctggccccagtgctggcctggagcatgtttccggagggggccggccagctggcgatgggctgctgtgtgctggcggggctggcaggcggctgcttcaaggcggggacccagaggaccgtagaggagctaagctggatgcagggggagctggagggcctgcgttcccgacctgggtttctgaaagagcacacgcggccggtggagtgggaccagaaaaagagagggctccttgtcttgctcctgctggctgcggcggccgtttttggaaccgtctgggggctgagccacagtctggccgccgccggtccggtgggagaggcggcggccctggttctgctggccctgctgtggctgctctcagaacagccctggcggaagaaaaaggggaggagcgcagcagcagagccgggcgtgaccatccaagggagcagcctggagcggtatcaggaggcgctggaggacttctgccgggcgatgaagatcccggccctgctggtaacggagacccaggaggggacggtcaacgccagcgcccgcctctccccaggccaggtgcccgagctgcgggtgaccgggggactgctgaagcaggctgagctcctcttccggcggacgggaaacctggagcagatggaccggacagtgctttccatcctgggccatgagctgagccacatcgcccaccgggatgccctccagctggagcggcgggcacgaaaggcggcactggtcagcggaggcctcttcctgctgctggcgggatcggtcctgctcctgccggcggctgccccactgcccgctctcctgctggtcctctatctgggggcagacctgctctttgggaagatcctgacggaccgccggttctggggacagatgtgtgagctgcgggcggaccggaccggcctgcgcctgagcggggcgtccggggaggagtggatgcagttctgggagatcgcgcggctgctccaggcggaggagaagcggcaggcgcggctgagaggggaaaatgtgctgtaccaaggttaccggcgctatctcagagtggagttccacccctccctccggcggcgaagagccatgatggagcgggggcggccctgggggtggcgggactatctggatcagctctggtatctccggatggctctgtggcaggggaggggctggaatgagtgagagacatggggaggagagccgcatatgagtttggagcgggcccggcaggccgccctggtccaggctgccctgcgaggagacgagcacgcccgggaggagttgggtgcgctggcagaggaatatttgcgccgctgtttcttccggcacgcacggcggtgctatggggacggtgtgaaagaggagttggaggacattgcatccgacgcggtggagaaatgtatggaaaggctggaccggtttcaggggggaagagctctgttcaccacctgggtctatgggttcgcgaagaatgttcttcggaaccatcacaggaagagggcacgccgagatcggatctgggaggaagtgcggaaggatcagagtgcatggtggcatgagccgccaccggatgagccccacttcggcggcgacccgctgaggtgggtgatccatcaggagaaactggaggccctccacttggctatggcggatcttccagtcaacgatgaggtcgttttgacgctgagggtggcaaaggaacggcctgaggcggagacggcccgacagctgaagctggaggatgaggaggtggaaaagctctatcggtgcgccctggagctgcttcgggagcggtttttccgctactattacggagcccccaggcggaagagagcggggcagccgaagtcggcctgaaaaaattgtccttgacaaaaggatggggccgcctttaatatatagatatccgatatataggaggtctatctatgggcatcgataaaggatggatggccgggagcacagcgatgctgctcctccggctgctggaggagagagaccggtacggctatcagatgatcgaggagctccgccgccgctcagaccatacgtttgacttgaaagcaggaacactttaccctttgcttcacgggctggaggagaaggggtggatcacctcctatcagggggaggggggcggcagaacccgaaagtattatcacttaacagaaaagggaaggcgggagctgaaggagaagcgggcggagtgggaccgctacacccgggcggtgtcccgggtgctggaggggggcgtctgttttggatgacttttttgcggattacatggatcaggccatggagcaggtgcgctggaggcgcgcccggcccgctctggcccaggagctgcgcacccacctgctggaccagcgggacgcctgcctggcccaggggatgagccagacggaggcggaggcggagagcctgcggcagatgggggacccggtggaggtgggtacccagctggaccgggtgcaccggcctgcgccccagtggggcatgctggccctggttgggctgctgctgtgctccggatttttcatccaggccaccgtgatgcagcagctaggcagagttcagccctatatgcctaccgtgatcgtaagcatcctcctgggggtcgccgctatggcggcggtgtacctgggggactataccctgctgggacggcgtccggtcctcctctattctttgggcatggctgctctggctgttttgatacagaggggcggaatgagagtaggagggatcagctacaccctgctggggccggtgctctacgccctgctggtctatggcctgcgagggaagggctggcggggactgctactggccctggcggggctggtcccgccggtggtcctgccctgcctcatcccgaatttcaccagcggtgccatcgccggcctcagcggagcagcggtggtgctcaccgcggcgtggaagggctggatgggggtgccccggaagaagggggcagccgccgtggccgttgggctcctggtattgaacggggccgcgctgtggcatctgtctcaaagcccttatgcgttggagcgggtccgattcgccctccacccggagctggaccccctggggctgggatatttccccatgatggtccgggagatgctctccggcgcccaatggctggggaaaggggagctgggggaactgagcggagcggctggctatctccctggcgtttcggattactggctggcccgggtgatccacgagctgggctgggccgctgggctggcccttctggccctgatgactgccctcttcgcactggggctgcggcgctgtatgcggcagagggggatgctgggacgcctgctgtccaccgcggccctgacgactctggtcctggagacagtgtgctttgtggtctatgatctgggattccccctggccgcgccgctggtgctccccttcctgtccaccggcgggcggtatatggtggtcaatctgctgctgctggggctgatgctgtccgcctttcgggaagagaggctcccgcaggggcagaaggggcccgccgcacagtcaagccggggccgccctctgatctcctggagggacggggatctggtcatcgccttgggcagaaggacgggaaaatgaccgcaggggaagcctccgacgcatcttgaataaaaggccctccagcggggattatctggaattttgttttttcccgggacatgtgtctgggaagggacatcccatacaaaagatgcctcagacagacaaaacctccggctcagccggaggttttgtcttaaaagtggagctgtttcggatctccgcatcaggaccagctgaaccagatgctgccgtcctgatctgccatcacgtccatcgcgccgtccagcagctcggccacgtcggcccgggtcagcgggtcggccatggcctgggcgctgtcgtccccgccgtggataacgcctgaggcggacaggttggccgcggcctggccggcccagtggccgccgctctcagaggcaaagacctccgcgggcacgtccaggatgcccatgaggttatccagcatcaccgtggcctccccctgggtcaccgtctcaccggagccgaagacgggctggccctcctggtccaaactgccttgaatagcccctgcctttagggcagaggagacatagcccttggcccaggtggggatggcctcgtcgtcatagaagccggtgagggtcacgtcctccaggggttccaggccggtggccgccatggccatggtcagaaattccgcccggctgaccggctggtctgggtcaaagaaatagcttccgttgacataggagcccacaaagatgccctcttcggccaggcggatggaggccttgtgggcagggttgccctccatatcagcgtaggtcaccttggtgtccggcttttcgatctggatggataccttggcctcgggagatacgttgcccgccgggtccaccgccacataggtgaaactatccttgccagtcttgttctcatagggggtatagacgaactggctggagccgtcctccgccacagtcacggccccccgggcgggggtggaggtgagctggaaggtgagggagtccccttcgccgtcctccgcgtcgaaccagccggtgatggccacatttttataggtggacaggtccatgttccgggcgatgggggcctcgttggcctcggtgagcagatatagggtgacggtcacctcctcaccggtctctccggtggtaaaggagggaaggaaggtgaaggcagtctcgttgacagagggtgtgggcagagcttggaactggagcccgctcagggcggaggcgtccaccagggcgccctcggtcaggggctgtcctcctacggtgagcatccctgcgccgatatcgggcagagttttcagcgtaatggcggccagcgcgctcccgccgctgccgccggagacagggaagtcctcggcagaaaaggaaatgacctgccccaccatgccgtttttggagaaatcggaaacgctggggacatcagttttcttgttccagaagaaggcggaggcgggcagggacagggtacagaccagcgccaacgccagcaccggggcgagcatcctgcggaaagctggggaatgattcaaaggaatgacctccttactttgttgatgtgcccttattttctgtgctaacaggaaaaatatgcgggcccacatgccggaaaagcccatggaagatattgagaaccagcaaaaggaagtgcaaaaggaagtgcaaaaggagctttgaggcagatcctccacatcatcttatttagatacagaacgggcagaacgaagtgctgccgtgatgaatgagggggatgttcttccatcagaacaaatcgccgggatcgggcgtgtatgggacacgcccctgtgtgagacggcaagacctggcgcgccgcgccgggctcagcggtcaaaaccacccgaaagagggaagataatgacaggtgccttgacggggggcggcaaaggggatacaatgaaaaaaactatggatgtccacgggatgccgccgggggcgcggcaccggcctggaaaggaagtttcatcatgaagactggattggtgctggagggcggagctctccggacgattttttccagcggggtgtgcgacgccctgctggacggcggcgtgatggtggactacgtgatcggggtgtccgccgggatcgcctatggggtgagctatatctcccgccagccccgccgcaacctggagatcgtgacccggtacgccggggaccggcggtatatggggatgaacaacctggcggaccggcacaacaggagctacttcggcctggagttcgtctatgacaccatccccaacgagcttgtcccctttgattaccagacctttgccgcctatcccggtcaggtggaggcggtggtgaccaacctgaacacgggggaggcggagtatatgccagtcccgcgggaggatgacaaattcctgctgctccaggccacctgcgccctgcctctgatgttccccatctaccatctgaatggacagccctatctggatggcggcgtggccgactctatcccctatgaacgggctttccagcaggggtgcgaccgggtggtggtggtgctgagcaagacccggagctatgtgcgccggccggagaagctccagccggtgattgagcggacctaccgggaatatcccaacttctgccgggctatggcgcggcgggcagagcagtacaacacctgccgggagcgcctgttccagctggagcgggagggcagggtactggtgctggccccggtgtccacccacaaggtatcccgcatcgagcgggataccaaaaagctgaggatgctgtggggagatgggtatcagcaggcggtggaccgaatggacgagatccgggctttcctcacgccggacagggcgtgacctcgtcctccgcagctggacagctgggctggagggccagcagagccagggcgtcccccagcacagtgaagaaggcggccatgcggccccgctcgtccacgtcggcctcccaggccaggaggacggccagcaggacggccgccgccagaaggatgtaggaatttcgggaaaacatatgggacaaaaaagaccaccccccgcagtccattctatgtggacggcggcggggcggtctctttttagtcagaaagtggggcggtacagtagaccgtcacacccccggcagtgagatagagggcggcctcccggctgccatcggtgtgctctgtgataccatacaccgcccagcctgcctcggcgccggggaaggacagggggtaggcggtagtgccgtcggagagggcctcgccgggggcgagggtgccgctccatcgctctccggtctccggccgggtgaggaccacgctgtctgcctccacctggacggacagggagagacggggaacgtcctttcccccttcccagcctggggcggcggagagcagcgcgcctcccttctggtcagtgacggtgagggcctgccagtccagaccgcgggggatcccattccccagcccacagccgggcagggggaacaggagcagcgtcagcaggagagggaacaggcgcttcatttcagcctcctctccaggcagtggagccggaaaaccagtacgccgcaggcggcgcacaggagggccagcagtgccggccggaaccaggcggggaacaggggagccgaggaagtgatgataacggtggggccctccgcgctgccgatgacccccatctggggctcgatcacccaatgaaagtagagctgggagacgccgtaaaccaggtacggcagcagaaagaggaagcagaagaccgccgcggcggtgcagacccaccggaacagccggagatagcgcaggacggtggtctgctggtactggtccatagcgcgggccgccacctgtcccgcctcctccacggacagagtgggggaagaggtccgctccccctggagcagctccaccagagagacctccagggtctgggccaggggctccagcagcttcaggtcgggaaatccccgtcctgtctcccattttgagacggccttgtccgtcacgtggagccgctgggccagctccttctgggtcagcccccgctcctttctcagctgggccacaaaggacccaaagcgtatgttgtccatacagcccctccttttctattttattatgacatggggcggaaaaaagtcaacctacgaaaagtagacagggccaatgagggaaaatcaggagtaaaattccggacttcggcgcaagctacttctgaaaaaggaggaatgcattatggaggagaaccagcagggggagcagcaggagatggagcaggccatccagcccatcgtggagatggggtcctccaccattcggaccggccgcggtacagtccatgtcctcaccatcgtggggcagatcgagggacatcagctgctgcctcccaccagcaagagcacgaagtatgagcatgtgatgccgctgctggccatggtggaggagagcgaggaggtggacggacttctggtcctgctgaacacggtgggcggggatatcgaggcagggctgggcatcgcggagctgatcgccagcatgtccaagcccacggtgtccctggtgctgggcggagggcactccatcggcgtgccgctggctgtgtcggccaagcgctcctttatcgccccatccgccgccatgactatccatccggtgcggctgaatgggctggtgatcggcgtgccccagaccttttattattttgagcgcatccaggagcgtatcctgcaatttgtgactgccaacagttccataaaaagggagacctttacaaagctgatgctccagaccggagagctggccgccgacgtgggcagcgtgatctacggtgaagaggcggtggagctggggctgattgaccggatcggcggcttgtcagatgccctatcctgtctgcacgagatgattgaggaacggaagagcggggccgccccttccccgtaggggacccatcaaagctggtgcggcccggaggatactttcggttcttgcataagggagggggcccctcccgcctccatcttatagggggagttgtcacggcggatgcagtgacggatgagaggacaccagggcagtcaaaaaagctgtgaggaattttcctcacagctttttttataaatcggtactctgaagcttttctgaagagaacagtgaactaaaggggaggagcgatagactgcgggaaaggcaaggagcctatctggtcccaaaatgttcgccagcgtagcggaggagctcctcccggaagcttgggtgggcgatggaggccatagcctgggcccgctccagcagggacaggccggtgaggttgacgaccccgtactccgtcgccacatactggatcatggtacggggggcggagaccacgctgcccgccgggatgcaggggacgatgttggacttcagtgtgccgtccttcttttggtgtgtggaattgaggcagatgaagccctttccgcccttagaccggaaggcaccctccaggaaatccagctgcccgccgatgccggagagctgccgggcgccggcgctctctgcgttttcctggcccataaggtccagttccacaccgccgttgatgctgatcacattgctcatctgcccgatgcgttccggggagtggacatagtccacatcgctggggcggaacagtccgggctcccggtccagccagtcatagagctcctgggagcccatggccaggttccaggttgcatatccccggtccacctccttgcggctgttggtcagctttcccttctggaacaggcgcagaaaagcgtcgctgatggttccggtgtgacagcccagatccttgatgtcggagtcggccagcatacttgctaccgcaaaggggacgcttcccacccccagggagaggaccgctccgtccggaatctcctgggccaccagctgggcgatcctgagatcagtggggctggggtcccggtaggtgcgcaggggcaggggttcatgctcaccctccacgatataatccgcctccgagagatggacgcggtggctgccgtccaccccttgcagccggggcaggcgctcgttgatctcaaagaccaccgtgcgggcggactggaagatggtacgccaggcgtagttggagatgcccaggccgcagtagccctggtcatccggcagagagacggggacaaatgccgtgtcgcagcggatgtgccggtcccggtagaggcagggcagggagcgcaggatcatgggcaggaactggaccaggccacgggcctgcagcttccgctcgtaatcccccaggtgccagctgtaatagtggaaggagatctgctccgggtcgcactccaccacctcgatcctggggcggatgaccagtccgccgcggatcttcacgtctgtcagccggcctttccgggcggccagcgccctgtccatcaactccggatatccgccgccgaagccgtagtctacccagtcaccggagcggaccgccctctccgcggccacctccggtgtcacaaatttgctcctgtcaagctccatattgaccttgtcctccgtttctgtctctgtgtggtgcggcccgatagagatccgccggtgatttgctatgtcccatatagtacacagaaatgcggactctgtaaatagaaatgagcataagaaatatctccggaaacagaaagcgctctggagagaggaggcccgctcaggaacacaaaatgggatcgggagaaatttttaaaaaggggttgacaaatttgcaccaatgtattattgtactaattgcttaatacaataatacgaacagaaaggagcacagacatgcaatggcagctggaaggcgaccggcccatctatcagcagctggtggaccagatcatgatgcagatcgtcagcgggcagcggaaggcgggggacaaggtccctgccgtgcgggagctggcggcggaagccggggtaaatcccaacaccatgcagcgggcgctggccgatctggagcgccagggccttctgtacaccaatcggaccagcggacggtatgtgacggaggatgaggaaatgatcacaaagatcagggaacggatcgcggaggagcggatctgtgcctttttggagagcatgtcccagctgggcttcacccaggagcaggtcctggggctgatccagcgggagagagaggagaagaacgcatgagacaagacaacgatttggtggtctgtcagggactgaccaagcggttcggccgccagacggccttggaccgtctggacctgaatttgcccaggggcaaattcatcggccttctgggccccaacgggagtggaaagaccaccatgatcaagctgatcaacgggctgctgactcccaccgaggggaccgttctggtggacggacaggcgccggggacctacactcacagcatcatcagctatctgccggaccgcccctacctcagcgactggatgcgggtgtccgacctgctggcctttttttccgacttttacaaggattttgaccaggtgaaggcggacgagatgctcaaggacctgaagatcggcccggggcagagactgaaggtgctctccaagggcaccaaggagaaggtgcagttgatcctgactatgagccggaaagcccagctctatgtgctggatgagcccatcgccggggtggacccggcggctcgggactacatcctgggcactatattgtccaattacagcgaggaggccagtgtcctgctctccacccacctgatcgccgacatcgagcgggtgctggacgaggtggtctttatccgggagggcgtcatggtcctgcacaaggacgtggacgccatccgggaggagacgggcaagtcggtggatactctgttccgggaggtgttcgcatgctgagcaaactgattcgatacgagtggaaggcggtcgcgcgggtgtgtatccccatgtatggcggcctgatcctggcggcgatgctgacccacttcctgctggggaacctggagcggttcagctccacgctctatgatatcatcactatggcgatgagcaccctgtgcttcggcctctttatggctgccttcgtgctgaccctgatcatccagatccagcgcttttccaaaaatctgctgggggacgagggatacctgatgttcaccctgcccgccagtgtgtcccagcatatcactgccaagctggttgtggcggtgctgctggacgtgctttctgtggcggccgccatcctggccgtgctggccctggcgctggacggcaccatgtggctcgacctgcccggtgatttttttgacatgatcgtatatgtggactggagcgactggctgctcctcctggaggtgctcatcctgtgtctggccgccggcgccgtgggcatgctgcacatctatgccagcattgcggtgggccacctggcccggaagcaccgtaccctggcagccttcggcgcctattttggctttgcagtggcgctgaatatcctctttaccggtatgctggagatcttcgtctcctccccctggatggcggagatcggccgctggtttatggagctgaagggggatacggggggacacctgctcatgtggctgctgatcctgggcatcgcggtgctgggtgccgggttctttgttctgacccggtatctcctgaaaaaccatctgaacctggaataagggatgccggaccgttttcaaggggggcgccgcggactgcgcggcgcccccctcttttttgcgggcaggcggggcataggacgggcccgcagctcataatctgagggcaggaagaacatcccctggaaggaggtccgagcatggagaccaggatcgcggagctgcggtacaaggaggtcatcagcgtcaccgacggcagccggtttggatatgtgggggacatggaggtggacctggagagcgggcaggtccgggccctggtggtgccggggcggctgcggctgttcggcctgctgggccgggaggaggaccgctatatcccctgggaccgggtgcggcggtttggggaggacatcatcctggtggagcaggagccccagcctcgggcactgcgccgccgccggtgagagaggcgcggaacgggaaaggcccgccggtcacagaccggcgggcctttccctatgaggggaacaaaaaggggggaggtcagcgagcaagatcctcacagaagttcatgaggatctgggccacttcggcccgggtggcggtgccggcggggtccagatagcctccgggtctgccggagatcaggccctcggacacggcccagcccatggagtcggccgcccagacggcgacgctgtcccggtcggcgtaaccgctcaggctgacggaggcgctggtgtcatagcccttgtatctggcgtagccatagaggatcagggacagctgctcccgggtcaccggggcatcaggagcgaaggaattttcacccatgccggccacgatgccctgggccgcggtccagttcaccgcatcggcgtaccatgcgccggcggccacatcggagaaggtggccgcgccggagacagcgggcttgtcctccatggcatagaggatctgggacagcatggcacgggtcagtgtgccgttgggggagaagcgggagccatcggtgcccgacatgatgccgttttcggccacgtaggccactgcatcatagtaccagtcgtcctctgccacatcggagaagaggggctgttcctcctcctgctccagagccgtaaagacggcctctaccgtgaccttggaggcgggcatggtgaaggtgaacctgccgtcgcccttgtccttgagcttgatggagtccccgtccttgtcggtgacggtcagatcatccagttcatagccgtcatcgggcttgacagtgatggtcacagtatcgcccttggaggcactcttgggggagacagtgacgtcgccgtggcggctgctgtccacgctgaccgtgtaggtggcggagccgctggagccgccgccggaagagcggcgggagatggtataggaaccgttaccgtgatccgtcagacggtacccggaggcggccaccagagtgggcagggtatcgacgtcctcacccttgaccagggtaaaggtcttactgccctgaatggtgaccgtgcccaggccatccttcagcacggtgatagtgcctccgtcagcaaccgcgtcgatagcgtcctgaagatcagcgtaacccacatcttccacctgggccgctgcctcgttggtcagagagaaggtgaaggggctgaagccgtggcgggtgctgaaggtgagattggctccctcatccgcctccgcggtgtaaaaataggtcctgccgttagaggcctgatgcttgatatagatggtcttgctggcaaagtcgtcgggcagggttagggtgacatgagcggttccagtgatgttcagatcctcctgggggatctccttgaccaccacggagttgccctggttgatatcgcctgcggtgctggcggtggaggccaccacctgtcccttgggcgagatgtccagggtgacggagttaatactgccgtccgtaccggtcagagcgtctactgtggtgacctgcagataggtctgagtatagaggacaatctcctcgctcccaagttcggactgtcctttttgtagcagttcgtccttttctgcgctgtcggccagctggccggcctgttcctgggctgcctgagacagggcggagcctgcgttcacagtgccggccgcctcgtttacggcctccttgacctcatcattcaggccgtcaggcaactggtccacagtctcggtaggctcggtgctggggagaacgtctacgtccgccccggtgacggtgacagtgcaggaggcgcggtaagcgccagcagaagcagtgatgatggcctcaccggcggccacggcggtgacggtgccgtcttgagccacagtggcaacggcctcgtcgctgctggtccaggtcaccgtctggtctgcattggaaggggagacggtggcagtcagggcagtgctgccgccgctgacgagtgtcagggcggagcggtccagggagatgccgtccacaccggcgtagctgactgtgacggagcaggtcagtgattttccgtttacctcagcggtgatggtagccgtcccgggagccgcagcggtcacagtgccgttgtccacggcggccacagcctcattgtcgctggaccaggacacagcggaagcaggcacagcgccccagggctcggcattgacagacaggacagcctcgccgcccttggtcagggcgagggtctgctggctcagggccagcgtgcccaccatgtactggtagccatcctgattgctggctacggcatccttgccgctgacaagataactggtaggatcggcggtgaaatagccgccggagatgctcaggccatgggcggtcccggtctggatatcgccctggaaagagccgccgaaaatgttcagagccgcctgtgcggagttggccatgatcacagcgggggggaaggtattccgttcggtcccctcggcgggagtgacggcgtaggtgccgccggtgatgctgagggagctggtgccgccgacggaggaggaataagccacataaacggccctggaattcccggcgacggacacggagacatctccgcccatttcgccgatcatgccgtagttggtgatgccatagcgggctgcggggttgggctgtccagcgataagatatccgtcatcgctgcttccaatggctcggaaggcgccgcctgtgatggagtcgatggtgccgtagttctggagcacattgttgccgccccagaagtgctgctcctggttgtccatggtaaaagtgcctccggtgatcgtgccgattttgccgttgggttcatttttcagcacattggcagcgccggtaaaggtgccaccggagatcagtttgatctccccaggatgcggatcagcggaatcatccactccgtttcggatcacactggagaggtttccgagggctttggaagtgccatcaccggtggtgaaggtgcccccggagatctcctcgatgacaccgccgttgaccacagtgtaccaggaattagcggcggtgccgccggagacgggatattgagtctccttgctgcgggtgaacataccgccggagatctcggtaatggtgccgtagttgtacagagctgccttgccatgggtgaccacatccaccacaccgccgccggcgctgtccagaatggtcagggcgccctgattgacgatggtgtggctggacacattggtcagggcttggccgttcaggtccagggtgagggtgctgttttcagaaatcaccacatcctcagaaaggtcgtggagcagcttcacgctggtctcaccggctttcagcgcttcggagatagtggcatagctgcctatgcttccctccacgttgtcggtagacacctcgcccttggtgaccagtgtgcccagctcggtggatgcgtcatagttgaaggtgacctcacgcccctcatccgacatgccgtagacataggtcccggtgtaaccgctggtggcggtgacagtcacattggacagggtacagtcggtgggatagttgtaagcgttgctgcggttacccaccaccagagccgccatggggacctcgttgccgctgccccagttgccatccaggtacttgtcttttccatcgatgtaagtggcgttcagctggatgtcggtgttggagatcttggcggtcccgccccggactaaaacaccctgccgtccaccaatgacagtgcagctgtccatggtcagcttaccggggatattgatcatcaccgggcaggaatcgcctttgctcaattcggaggggagtctggcctggaaggtggagtctttcaggtcaataacgacatcatagttatctgtctggcctgcattggtagccaccgcatacacatcggcagtgatggtggaatcgatgaccgtaactttggctgcatttccctggggatacagtgcactgcctgtgcagtcatatgtcacattatcgagtttaatagaggaaccgctctggatattgaaagcagttactgtgggattctccagaggtttggaaacaagattgccattctggatggtaagtgatttcccatcagccagcaagatagaagtgttgtttgtcagggtcagggtgttcttgcccaaatcgatggtaagagttttgacaccctcggggaaggagaaagatatctctgcgttatccgtgagcgtgatcgtgtcgtcattctccgcagcactcagagcggcgtccagcgtctcgtactcagtggtaccgatcacggccaccttggcggcaccagcatagagttgagtgtcatccgtcggaagaacgaccggattttcgtctccgggcaggctgggggcgtctccagcatccgggccgtctccgggcagggtgggatcattcccctcgtccgggccgtccccaggcagggtgggatcattcccctcgtccgggccgtccccgggcagggggggatcgtccccctcgtttgggccgtccccgggaagcggatcgtccccgccgcctccggtgttccccagatcggggtcctcctgcacctgccccgcgggctgactgccggtgtccgcaccgtcagccagtgctgtgacagggagcagagacagtgccatggccatcgtcatcacgatggccaaaagccgttttttcatgcataacactcctttacaaaaaatagggtctgctgtatgaataagcggatgataccgctgattcaataaaacgaaatataaattacgtctataattaaagcgcgttttagtgggaaacgcctgccatcttcaatcttgaagatggatcatgcccatatgggcatgatcatgaaatttggcgttctattttttaaaagaagaaaagcatctcaagctgatctcctggttcccgatacatgagcaataatattcaaaataattattatgttatttttgggataagtatagcacaagtgcggactgttttcaagggaactcttcttttttgcttttgcgaaatttgaagaaatttcctgaagggcagggcagagacagaaaaggggagctgcccgctcacttttttcaaaaaatacttgtattcggcggaaaactgtgatatactaccagcgcattatgcctgggagtgctgattttccgcccagtgcccggcctcggccgggttggcggggaatatgaggcgcccggaaagatcaaactgaattttaggaggaaacaagaatcatggcagtcgtatctatgaagcagctgctggaggccggcgtgcacttcggccaccagacccgtcgttggaaccccaagatggccgcttacatctacaccgagcgcaacggcatctatatcatcgacctgcagaagaccgtgaagaaactggaggaggcctacaacttcgtccgtgagctgggcgagaagggcgagaccctgctcttcgtgggcaccaagaagcaggcccaggaggctatcaaggaagaggcttcccgcgtgggcatgtactatgtgaacgcccgctggctgggcggcatgctcaccaacttcaagaccatgcggggccgtgtggaccgcctgaatcagctcaagcggatgcaggaggacggcaccttcgacatgctgcctaagaaggaagtcatgaagcacctgggcgagatcgccaagctggagaagtacctgggcggcgtcactgagatgaagaagctgcccggcgccctgttcgtggtggacccccgcaaggagcgcaacgccatcaacgaggcccgcaagctgaacatccccatcgtcgctatcgtggacaccaactgcgaccccgatgagatcgactacgtcatccccggcaacgacgatgccatccgcgccatcaagctgatctcctccgtcatggccaacgccatccaggagggcaagcagggccaggatgaggcccccgctgctgaggaggccgctcccgccgccgcggagcagtaagccttgacccaaagcgcccgcccgacggacgggcgggcgctctctttctgtattccagagaaaaaacgatcatattttatggaggtaatacaaatggcttttaccgcgaaagacgtacaggccctgcgcgagatgactggcgtgggcatgatggactgcaagaaggcgctgaccgccgctgacggcgacaaggacaaggctatcgagtggctgcgtgagaagggccttgccgcccagaccaagaaggccggcaaggtggccgccgagggcgtctcctacgccatcgtcaatgaggctggcgtgggcgtcgtggtggaggtcaactcccagaccgacttcgtggccaagaacgaggtgttccagggctttgtcaaggacgtggcctccgtcatcgccgccgaggaccccgccgatgtggccgcactccaggagatgacctaccccggcaccgaccgcaccatcgcctccgtcaccgccgacaaggtgctctccatcggggagaacatccagatccgccgcttcgtccgctatgccgagggcgtcaatgtgccctatatccacatgggcggcaaggtcggcgtgctggtgaacctggccgtggagggcatcgctgacatggccaaggtcgtcgaggtgggcaaggatgtggccatgcagatctgcgccatgaaccccactttcctggacaagagcgacgtggatcaggccaccctggacaaggagaaggagatcctgatggtccaggccaaggaggaccccaagaacgccagcaagcccgagaatatcatcgagaagatggtcatgggccgcattggcaagtattacgaggagaactgcctgctccagcaggccttcgtcaaggagaataagatctccgtggagaagcacgtggctgaggtggccaagcagctgggcggcaagatcaccgtcaaggccttcacccgcttccagaccggcgagggtatcgagaagaaagaggacgacttcgccgccgaggtcgccagcatgattaagtaagaccgctttacagcgcctgacagataacttgatggagagagcccgaggcaacgagagttgcctcgggctctcttttagtttttccacaatagaagatcccccgccgcagaattcggcaggggatcaaaaggacatcaggcatccagcagaccggactggaccaagaagtcgtgggcgacggtctccacctcctcgcccgccacgtccacccgataggtgagctcactcatcagttcgtcggtgaactgctcgttgaggagctggatggtctccttgaggccgggagcatcctccgcgaagcgttcgaatacgtcgctgcgggccagaatggtgccgtagtagtcggggaagaagtgctggtcgtcgtccagaagagtcagattggcccgtttgtttaggccgtcggtggcgtagaccaccatcacatcgtaggcgccctgctcgatcagggtgtacttcatcataatgtccaccgggttggccacctggaagttcaggccgtaggtctccaccatgggaccgaacttcatgttgcccgcgtcggtgaagaagtcctgctcagcgcagaagcgcagctctccggcgatgggcaccaggtcgctgatggtctccgggtggtaggtatccaccacctcctgagtgacaccgatgacgtaggtgttgttgacaccgatcttgcccagcagctggaggtcgtactcctcattcatcttctcgttgacaaagtcgtagagggtctgtccctctgggatatcggtggtgtccagccccatgatggtggtaaggagggtgccgtcccacgtgtacatcagatcgcaggagtgattggcggcggtgagggcgttgaagttgttcaccgcggtcatctcgtcctggatggtgacagggatgccatggcggtcctccaccaactgcttgatcatgctgttgaccagctgtacctcggagaactggccctcatagaggagcaggccggcggtgctcttgggcaggaaggcgtacacgcacagggccagggccgccgcacaggagaggacggcagctccccgggcggccatcctgcggcccctggggcgctggctgtcccggctgttgagataccgctccgccatgcccatcagcaggtccagaaccagggccgccgccatgagtacgccggtgccgcccaggatggcctgcatgtcctcctggcggatgccggtggtgatgacgctgcccaagcctccgccgcccacaaaggaggcaaagaccgcggtgccgatggcgttgactgcggcaatgcggatgccggtgaagatgatgggggcggcgatggggatctccacatggacgaggcggtaggtacgggtcatgcccatgcccctgcccgcctcgatcaggtgctcaggcacttggtccagccccaggcaggtgttgcggacgatgggcagcagggagtagagggccagacccacgatgacagtgggcttgcccggaccgatgaacaccatgatgatgcccagcagtgccaaggcgggggtggtttggatcaggtccaccactcggaggacgatcttccgggcagcaggataaaagtggcagaggatgccaaggggaacacccgccaggacggcgaagatgagggcggcgaccaccagagacaggtgctctaagatcatggaagcggtcataccttatcccctcccttccgcatccccttggggaccacctgacgctggaccagatccaccagagagcccagcacgaaagccaggagggcggcggggatggcccccatcaggatgaggccgttgtcattggagctgatcccggagtagatgaagtcccccaggccgccgccgccgatcatggaggccagtaccgcccagctgacggtgtagacggtggacatgcgcagcccgccgatgatggtgggcatggccaggggcagctccacccgaatcaggctctgtatggcgctcatgccgcagccacgggcagcctcgatgtactgctggtccacggataccaagccggcataggtgtttttcagcaccgggaaagtggcgtagatgcccagggcaaccagtaccgttgcggtgcccgccccccaggccagcaccagcagaccgatgaacacgatgcccgggatggtgttgaagacggacaagacgggcaggactactccggagagcttgggccgccgggacagcaggatgcccagcacaaggcccagggcaaagccgatggcgacggacaccagggtgaacagaagatgttggccgatggccacaggaagtttatcccatcccaatgtgtctcacccccaaagctgttccgccatagcggaggtcatgctggtcttggtgatgatgccgtccaccttttcctcctcgttcaggacaatgaggtagggggcgccgctggagatcagcaggtcgaagcagtccttggcgctgtcccctgtgtggacggtgggggtgttgcagcggatcaggggctcgatggtcttgaccacatggccggtgaggcggatgtccgcaatggacacggtgccctgatagcggtcctggtcgtccaccacgatcagggtgtccacgttgcgccgttgcatcttgctgacgcactcgttgacgccccggcgggcggaaacggtggacacgccggagcgcatgaagtcggcggcggtgagctccttctgagcgtgggtgtcgatgaaattgcccaaaaagtcctggatctgtccgctggcggggtgggccagcatctcttccggaggcgccatctggacgatgttgccgtggtccatgaagataatgacgtcggccagatccagagcctccgccatgtcgtgggtgacgaagatgaaggtcttgtgcagcttctgctggaggcccttcacctcctgctgcagggagcggcgggtcatggggtccagggcgctgaagggctcatccatcaggacgataggaggggaggcggccagtgcccggaggatgccgatgcgctgctgttgtccgccggacatctccgaggggtacttgttggcgtactgctcatagggcatctccaccatggcgagcatgtcgcggacgatctggtcgcactgctccttggagtacttcagcagcttgggcaccacgcagatgttttgggccaccgtcatgttggggaacaggccgatctgctggatcacatagccgatgtggcggcgcagctccaccttgtccttggaggtgatgtcctcctcgttcagatagatctttcccgtgtcgggctggatcagacggtttatcatcttcagtgtggtggtcttaccgcagccggaggggccgatgagcacggcgaactgcccctcctcaatttcaaaacacagatcgtttaggatcttttggctgccgtaggacagggatacatggtcgaatcttaacaaatgagacctccttttccggtgtggccggagaccggccagcgggccaacgagaacggcaccggaggggcgcccttcaggtatcaggtgcgggatggagggggagagccctctgctccaggtagaaaattgggtaacattacaactttattatagcagtaccagaaaaaactgtcaaataaacaaaatgtaaatatgggtcggatgacataaatatggaattaaactgggaaattaagaaactttttataaaatcttaaccatatcccgggcctgtccttaaaaaacgtctggtacactcgaaccagcaaaggaggcgagcgcatgaatctggaaatcatcctggtcaggacggtcctggtgctgaccgccgcgctgtcggtggggatctctctgtggggcggatactatctgctgacgggcctgatgtcttggcgcaggcccatggactacggccggcaccccgccggcacccggttcgcggtgctgatcgcggccagaaacgaggaactggtcattggtccgctgatcaacagcctgctggagcaggagtatccggcggagctgtatgacatctatgtgatccccaacaactgtacggataacacagcgctggccgcccgacagttcggggcggaggtgctggagtgcaccgtgccggtccggtcaaagggggaggtgctccgctttgcggaggagcagctctccgggcggcactatgacgccttctgcgtctttgacgcggacaatgtggtggaccggtgcttcctgaaggagatgaacaatgcatatcgggccggggcccgggcggcccagggctatcgggacagcaaaaatccctatgacagcgccatctcgggatgctactccatctactactggatgatggaccgctttcacaaccaggggaaagccggactggggctgtccgccatgatcaacggcacaggcttcatggtggccgcctctactctgaagaagctggggggctggcggacggagaccatcagcgaggacctggagatgaccgcccagtgcgtgctggcggacgtgcaggtggcttgggtgccgctggccgtcacctatgacgagcagcccctgacttaccgggagtcggtaaagcagcgcaggaggtggagcagtggcaccatccaggtggcgcggcagtacctgccacggaccggacgccagatgacagcggccccccggggagcgcttctggacataggcatgacgatgctgatcccggcctatcagctggtggcggtggtcaatacgctggccgcggccgcggcggccggcctgagcggacggcccttcaccttcgcggcaggggcgttctgcggtgcgatcctgctgaacgtgggactgacggcggtgttcgccaccttgagcggcgccctggtgctgacagtggagagaaagtgggaccgccgcctttggaagagcttgctggtctattggctcttcctgctgagctggctccccatcaccatcgggagctttttcaagcagactacggtctgggaggagatccggcacacccgcaatgtgctgccggagccggtcctggcccggaagtggtgatacatgtggaaaaaggaggaccgcccatgcccatgggcggtcctctcagtttgtgggaaaagccctcctgcaaaaagctccggggaccgatgggcggcaccaaatcgaagccaaacgcagtggattcgatttggaacggaggagcaagggagcggcagaatgagtgcgcgatgagctttgcaattgaaatgaaaaggctcgtggcaagcgatatgtcgcttgccacgagctggcgcagaaggagggattcgaaccctcgcacggtttaacccgtctactcccttagcaggggagccccttatagccacttgggtacttctgcaactatcaatagcgcctcgtcaggaaagaggtggcggagagagtgggattcgaacccacggctcttgcgagtcaccggttttcaagaccggctccttaaaccactcggacatctctccctgttgatctccaactcagaggcgaatgaaagcataccatattttgagccgtatgtcaaccttaaactgcgttttttgtgggctgttttttctgagcctcaaaacaggggcggtcagcccgccgggccccgactgaaaaggcccctggaaaaaacgggcagtgcatgttccgcagggcgctttcggtttttgatataataagaaggaccccgtccaaattcatatttgggacggggtttttgatggaacttcccgattcccatttggtgcggcttgtttatgcagggcgttctctgccgcatcgatctgaattggggcgatgaaagaggaggagccggaaagcgtggaatatggatatgttcgggtgtcgggaaagagtcagaatgaggagaggcagctctatgccatggagaaggcggggatcgccagggagaggctttacatcgacaagcagagcgggaaggatttcaaccgcccggaataccagcgcctgctccgcaagctgcgggagggagacgcgctctttgtccagagcatcgacaggctggggcggaactatgaggagatcctggagcactgggggctgctgacccggaaaaagaaggtggatatcgtggtattggactttcctctcctggacaccagggggaggggagaggaccagagcctcaccgggaaattcctggccgacatggtgctgcagatactggcctatgtggcacagaaagagcgggaaaacatacgtcagagacaggcggagggcatcgccgtggcgaaggccagcgggaagcgctgggggagaaaaaagaaaaacttacctcctgatttcccggcactctacacggcctggaaaaatggggagataagtgaggggcagcttctggaagtctgcggaatgaagcgcagcacgctgtataaacgtctgcaggagaagagggcgtgccagagggagtaggaagaaaagtcccaaaaagtgtactcagatagacgaaagaaaaaaatcttttctctctgtaatacttaacttttccgccggaatgccgaagtacataacagagacccaggagcagacagaagtctatctgagtacacttttctggacttggaaaagccttgggcgtttggagggaagagcatgctggtgttgggagtgcgctccggcgaatacatcaccatcggacaggatatcgtgatccaggtcgtcaaggccggtgaagtgacgcggctcgccgttcaggcgcccagggagtgccctgtggtgcggggaaagctggtggagtccagcggcggggcgcccgactgcatccgtaagctgcgccagaagaagacacctccccatacatcaagattcaaacaggaccgggacgagaccggggccctgtctgaatagtaccatccacccctgcggaccggagggaaggaaccgtccgggaatatcaaaaataaaggagaaatcactatgcgtattcagcacaacatcatggcgatgaacgcctaccgcaactacagcaacaacaccagcgccctgtccaagaacctggagaagctgtcttccggctataagatcaaccgggccggcgacgacgccgcgggtctggccatttccgagaagatgcgcgcccagatcaccggcctggacaaggcccaggacaacgccaaggacggtatctccctggtgcagaccgccgagggcgccctcaccgaggtccacgacatgctcaaccgcatgtacgagctggccgagcagtccgccaacggcacctatgaggacgccaccgaccgcaatcagctccagaaggaggtcgaccagctcaagagcgagatcgaccgcatcgccgactccgccaacttcaacggcatcaagctgctggacggctccatgaaggacggcaccacggtggctatcgatgcaggcagcgtcactggtaaagtgaatggccaggctatcaccgctgctagcggaacggccaacctgtctggtaacttcaaggcgggtgacaccgtcaccatcaacggcgttacctatacctgggcgagccaggccacaggcgctgacggcaagacctttaaggatttcaacgctctgaagtctgctgccaaggtaaacggcgtgaccatcggcggtactgcctccaaggccaccttctccaaggcgggcaaggatctgaccctccagatcggcgacaccagcgagacgttcaaccagctggaggtctccatcaacgactgccatgtggccgcgttgaatctcaccgacatgaatatctccgaccaggacagcgccgccgaggctctgaacatgatcaagagtgccatcaactatgtctccgacgtccgcggcaccctgggcgccacccagaaccgtctggaccacaccatcaacaacctgtccgtcatgcaggagaacatccaggatgccgagtccaccatccgcgacaccgacgtggccgacgagatgatggcctataccaagaacaacattctgatccagtccgcccaggccatgctggcccaggcgaaccaggtgccccagggtgtgctgcagctgctgcagtgatcccgggcagttgttctggaacagcgaccacagggggccgggctcagtgcccggcccccgttttttaggcgcggagggcgctggcccctcgcaggaatacttgcggaccgtgaggtttttctatggatacgatcaaaatcgcccgccggctggcggagctgggacagacggcggacgcccagcgggcctacaccctggcgctccaggcggcaggattgtccccggaggaggagctggaggccgccagctatcttctcttttccaaaggcgactaccgggtggcctataccagcttcctgtctctttaccgccggggcctttttcaaaaggaactgctggagctgatgacccaggccttctacctgcccaatgtggaagctctccgcaggcagtatgaggagaactgcacactgctctcccgctatccctatctgtttcggagagactttcttccctttgaggacctgcctattcaattttacccctatgacgatgacggctatcttccctttgactggaagagcggccttttttccgactatgtgaatttccatactccagtgatcgaccgaaattttttccatgacctcgaaaagcctgtactggcatcagatgtgtactcccagtatcagctggagtacctgaacgacacggtgcgcaagagtgagtgggtgggccgggagaatcatatctaccttcactacacggattgggggaccttctgcgcccatctccagtgtctgtccttcaaaaaattgctgaaggaagagaagcttgttttcctgatcgaggacgagcttgcccaatatcccatcgattttcaggctcggttccatatcgattacagccgttacccggtgcgcccggtgggcatccgggaggtgaaccgcctgatctggcacacccagctggcggcccacaacggcggcgacttcttcaacgagatcttttatgggcaccccaatcttctggcctatgaatccgttattctggatggtatcgacaaccttttggacgagatgcgccgccgggtgcgcgagcgtcggctggagaccgccaccgaccgtcagctcctccagatcaaacatcccactgacaaggacctgctggttgcctattttttaaaccagcaggaaagcaacagcagcctcgatcccgattcccgcatcaccccgatcctcttcttccagccccacttttataatatttcgtatgatatctcagtggacacgaagagcaacaagaccgtgctccactcggagcagtacgaccgcatccgttcctccgctgtgttccagaacttcaaatacatcaagaccttcacccccatccgccgtcccaccaccagctatgccgcgaccattcgcttcatggagccgcaaattgaaaaagaagggcgtattgtggccgatgacctgaccgcccgcatgctcaaccgcagctttatggtggacccctgggatcgactctaccgggacagcgtcctggtgcgcttcgaggacggcaagctgaaccccaaagccacctttactgccctggcggagttccttgacctcccctacacccagagcatgacctattgctccggggccagcggcatcgacccggaatctctggccggaaatgcccgcggctttgacccggctacggtgtatcggacctatgatgagtttgcaaatgatgatgagcgggcatttctggaatacttcctccgcgatgtctatgaaacctatggatatgattttcactattataagggcgagccggtcgatgaagagtgggtgacgaaaaaaatatccagattcaccactctcaaccggtttatcagccgttcttgggaatctctataccggaatactcataatcagaaaactggagctcccttggatcaggaagagatcgaacggcgtattcaggataccctctccggcctggattccaaccggctgcacgtttccaagcttctgatgcggggactgcgttttatcaatgaagatggtcagcccctgaaaatgatgacgccgctcaagctggacccggccctgctggaacagccgctctatcactgaggaggaccacatggaacacaagggaaccgtttactttttcaccggcctctccggcgcgggcaagaccaccgtaggcagcctcttttaccggcggctcaaaaacaccaagcccaacgcggtctatctggacggtgacgagatccgggtggccttcggtgaggatgtgggctacaccaacgacgagcgcctccgatgggcggggcggatcttccgggtgtgtaagctcctctccgaccaaggcatcgacgtggtgtgctgctccatcgccatgtatcagagcgtccgggcctggaaccgggccaatatccccaattacaaggagatctatctgagggtgaagccggagaccctgctggcccggaaccagaaggggctctacaccggggggcacaatgtggtgggggtggacctgccctttgacgagccccagacccccgatctgatcattcagaacgacggagaacgcacccctctggaggcggtggaggagatcgagcgggtcctgtatcccaacatcgtcgaaaaccccatcgataaccgggactactggaaccgctattatcaggacggcctctgtcccatggacccctccccctttgcccggtatgccgccactctggtggaaccgggacggaccctggtggacctgggctgcggcaacgggcgggacgccctctactttgcctccctgggcctctctgtcatcgccattgacctgtcagacacggccattcagacgctgcgggagcggggcggagacaacccgcgcttcctctgcggggactttatcaacgcccccatccaccggcctgccagctatgactatgcgtacagccgctttaccatccacgccatcaaccagcagcaggagcggatgctgctgctggccatgcaccgcgcgatcaagcccggcggaaagtttttcatcgaggtgcggggcgtccatgatccgctgtacggcaggggacagccccaggagaaaaacgcgttcttctacaacaatcattaccgacgcttcatcgtcatggaggagctgaccgcctctctgcaggaggcggggttccgcgtggagtacgcacaggagcggaccggcttcgccccctacggaaatgatgacccgccggtgatacggatcgttgctatccgcaaggagatgaaagcatgaccgtcctggcagacctccacacccactccaccgcgtctgatgggcagtatgcgccggcggcgctggtggaaaaggctgccgccgccggcatccaggtgctggcggtcaccgaccacgacaccattgacggcgccgaggaggcggtccgggcgggcacggccctgggccttacagtgttgcgcggcgtggagctgggggcggccgaggaccggcacatgcacatactcggcctgcacctcggcccggagtgccccgccctgacagcgctctgccgcaagctgcgcgccagccgggacgagcggaagttccgcatcgtggactttctccgggaaaagggtatggatgtgtccctggaggaagtggaggcgctggcaggcggcggggtcgtcgcccggcctcacttcgcccaggtgatgctccggcgcgggtatgtcacctccctccgggaagcattcgaccgctatctggattccgatgaatatcagcgcatcgaacactggaaggccggcgccgcggagtgcatcgccgccgtccacagcgccggcggcagggccgtgctggcacacccttaccagctgggctatgcggacgatcgattggaggagaccctccgcaccctgcgggagaaggggctcgacggtttggagtgcttctatccccgtcataccccgggacagactgccgcctatctgcgtcttgcggaaaaatatgggctccatatcacagcaggcagcgatttccacggggaagccgtccgtccggacaccagactgacgcccatttccctcgaactggggtggctgatttaacagcgggggaggtagacttgacaaacacatcgcttccatcagcgcaggtaatatgagaccgggtttggcaagagcgccaaacccggtcgtttttcagccatcccagcttccagtatgttcaaaattcctctttttccttgagaaagacatagtgatcgtgcccggaatgggcggcgtcataccggtaacccagatcctgaaagtctttcagctcctcgctccggcggacgccacgctctgccatccatcggaccatctgcccccgggccatcttgcacagcgtgcccttttccaccacccggccgtccttacgcagctcgccgaaggtgcaggtgagcacctccacagaggggggcaggtgggggagcaccgcccggctgtactcctgggaggccaggtccaccaccaagccggcctctccggccagcgctcgggccagcctgtctccccagaaggcgtacagatcagggcagccgttcaccgacagacgggcctgcatctccaggcggtagggcgtcacgccgtcgaaggggcggagcatgccataaaagccggagaggatgcgcagatgttcctgaagataggtgaactggccggtctcaaagacgccgggggccatgtactgatactggatgccctgataggagagcagggcgggggtgaggcccttccccagctccatgcgggccagccgctccacattcagatcggtgatggcatcgctgcaccgccacagctgcttcagctcctgccgggacagggaacgcagagcggagagcaggcgctccgtctctgggagaaaggcgggcagggcctggggagagagcgtgtcggtgtcggtccgcatctttttggcgggggagatgaggatcttcatgtgctcgcctcctcccactgcctcagaaccgccagctgttccggggtatggaaccagtgctccatcccctccgccgcagtcagggagcaacggaagcggcgggcaaagcggtccactgtgtctcggggcaccagatggtccttttgggcccagaggatgcgggtgggggtctcccagcgggagacagggtgggcgcggacgtactggagatagggccaggacagggtctcaccgaactcagtggaaatctctccctcggcctccaggcgtgactcggtcaccccggcccaggacatcatctcctggatcaggcgctccatgtccagcaccggggagacgaagagggctcggtccagggggcggtcctgaaaggccagcagggagaaccacgcccccaggctgacggcccggagggccaggcggttccacttctgtccggacagggagagcaggtctctcaactcggggacagcgtgccagggggtgaagagctccggcccgccggaccgtgccccgtggccgggcaggtcgatggccagtacctgccagcccttggggcagaccacctgggcgaaggactcggcctcctccttgcggccgcccttgccgtggaggcagagccagacctgaggggacggggagccgtagaggacagcggggacggaggcgtggttcagagtcagagtcatggtatccataaggttcctcccgctccctggggagcgatctgtcgtaggatggctggggaggcgtcagggctggatggccaccttgatgacgccctcccgccgggactcgaagagctggtaggccgcgtcgatgtccttgagagggtaggtgtgggtgatgaggggagtggtgtccagcttcccggcggcgatcaggtccagggtctgggcacagttgcagccatccaccccgccggtcttgaaggtgagattcttgccgtacatgtcgggcagagggagcagctgcggccggtcgtaaagggccaccaccgtcaccaccgcatttggcctggcgcactcccaggccagacggaaggtgtcctcgctgcccgccacctccagcaccacatccgcccctccgtgggcgctgtgggccaggaccgcctcccggagcccctccggctccagtgccagcacctgaggatagtgggcacggacgaaagccaggcgctgggggtcccgctcacagacgatgacccgcctggggttttccagcaggacgcactggagagtgcacaggccggtggggccggcgcccaggacgagcaccgtgtcctccggtgagatctgggagatctgagcggcccagtatccggtggccaggatgtcccccacgaacagggcctgccggtccgtcacggcgtgagggatcttggtcagcccctggtcggcataggggacccggacatactccgcctgcccgccgtcgatgcggcagccaagggcccagccgccgctgggatcggtgcagttgttgacccagccgtgtcggcagaaaaagcaggagccgcagaaggtctccacattgacggccacccggtctccggggcggagggtacggacgtccgggcctgtctcctccaccacgcctaccatctcgtgtcccaccgtgacgccgggcaccgcccggggaacagagccgtgcttgatgtgcagatcgctggtgcagatgctggccagcgtgacccggacgaccgcgtccccggggtccagcaggaccggctttggcttgtccagcagggcgaatttcccccgctccagataggtgtaggcgagcatggatcagacctcctgtgttttgagatggatgaaggcggcgccggatcggagagaaggtgccggtgcccatgtcacacagcgcgccggaacccagggcgcgccctaacagcgccgcccggcctgcccattatacctcaggaagagaaaaacagcaactcgggaagttagggggagcggcaggggacatgtgatgataaaacctgagaggaactaaggccgtcaggcagtttggtcaaatgtcctgatagtttgttccctgaaaaagctgcagtaatctgcagactccccaaggaatttcatcctgataggacagagaggcttctgactgctcctgcgctagttttatgatggtgctgtctgttgcttcgagttcatttccgtttggatctaaaagctttcccaataacagcactccgtgcggcccgcagagttcctctttaaatttcaaggcgtcaatagccttattttcttgttctggagtcactgtataaaacatcagcttcttttcgatctgctccagttgttcttttgctgttttaaaaatcgggaacaaatcgaagcactcttccagtttggcaaaagcggcgcgctggggagcggtaaagcgggagttgtcgagcaaccgttgacgatgtgcatatatctgcgcgggcatgcctaaacgcacggatataccgtcaaaaacatcgtctacatgttggaaatttcgaagggcatatgtaattttatactcatcgtaagtatcgaaggcaagcgtggtcagcttttgataagcggaaaaatagttggatccctcgccataagctctgactatataggttctccaatgatcaagacactcgttgaaagagtacaagaaatttgccacagcatcctttgcgttacgttctaactttgcggcgtttttttcaggggcttccaggatttccgctaatgcagaaaatcgatcttctaccctctgaaaacggtcaatattcttctgataggggcccagctcctgtgctaatgagtgataccacttgcgctcatcgcttgtggccggacgcagatgctgaagagtgctatcatcgacatagaaaaaatactctatatccatatctatattctcctctctcaaattttaaaatcaagaatctcatagagttacttttggtatatcatttattaaaaatcctgtcactcaattttgctttcgagtgtagttataggatttccagttatgaatattcctactattccacatgcacacaggcatagcaaaagaccgccgataaacgtcgacggtctttccaatttggttggagtggaattataggattccacgaaatcagaacaacagaaatggtattcgggtagtcggcgatcagtatttcccttttcaaattttctgacggaactcttgtattttttcgatgataatgcgacttgggtcattccctcgttgttttccgagtaacatctgctctacatcattatcgcttaaaattactatcattttgttttcactttgccaaatgtcacgaaggtgtatttcagaacttgggtctccgccacatctcgaaaaaataaggccaaataagccaacgcccttctcttttaaataatgggcaacttgcaaaatatcatcttttccaatttcatgcgcagaattctttgcatctacaacaataaactctgctttataccgatctcgaaggtacatccaatatccatattctgagtaatttgggattatatagtctcttcgattagcgtaattggcatcggagttttgttcagacacaggatcgagaggcgggcaaaatagggcgaatagaatttcgccaaccaatttttgatagacctgccagtcttcataccccggtcgacattgtttaagcttagcaatcaattcgtcatattgatccggtgcagcacaaactggcaacgcaatgtccggaacccccaaacgaagagtttcactatcccatagtgtaattcctgccgttttaacacgttgacggtattctgaggcaagaagtgtaggaacagcaagaatataattgatatttggacaggcttgcttatagtaagataactgtcgaattgctgataatattctttgatctgtagcggctaacatctcttttacctcgatagcaaacatttcttctttgccatgaagctttcgagtaaatgtaatgtcaaatagtattttttgtccatcggatgtttcggcaggcgtgtccatgcagacattttcaaatctgacatcttgatctaaaaattgcttcaagtattctttaaacgcatattctgaaaaataagcgcgatttgatagctttgagttgcattgtttgcaaagcaatcttaagttgtcaatatgatccgcaccgccaagacttttggggaaaatatgatcaataacggtctcttcgtatactaaaggcctgccacatcgtgcgcatcgtccttctccgcttttccaaagctctctttttgtgctatcattgatcatatgcctcacctcagattaaatattatcataaaaagaaagccataacaactcttacactattagttgatgccagattaatccgattttgggacaaaatagagctgttgacaaaataaatgtgcataaaacggttgacaagaaagataaagtactgcacaatataattagcacgtgcgcaaatcatattgtacaggaggactcgtgatggatacagcaaaggagcttcaggtattgcgtgaggagttgatccgggaaatagatgagaagatcggacaaatgctaaaaaaactgcaaaacgagaataatacaaaccaccaaaaaaatcatgtacagacgagagtatatgaaagcgtttaccctttgaacgtgggaacaggcatatacaagggaaagcggccaacagcagttatattccctggtgaagtgcgaaaagagtgcccaacatggaaaaaagttatggaagaaatattgaaagattgctgtaaaaatttggagagacaccagatgctcatggatctccgtggtaaaatcttggggcgaaaccgggtactgctgggcagtgagacagggaaaatgcgcagtccggtgaaaatagatgaggctctttttgtagaaacgcactatgacgcagagactttgctgcgtatattgacgacccgcattctggatgaggttggttatgactacagtaagatacaaattgcagtaaaaactgagtaaagaggaggaaaagtccatgcagctgaaaatacacatgctgacaatagaggatctggtgcccgcagatcatttactgcgaaaaattgacgctgcactggacttctcctttgtctaggaagaaacatccggcctgtatcaacggcggtacggccgtccgcccatcgacccggtggtaatggtaaaatatttgttgattggctttttgtacggcatcccatcggagcggcaaatcgaacagcggtgtgcggacagtaatgcgtttcgctggtatttggggatagatttggatgaacgggtgccggaccacagcacgatttctcagctgcaaaggaggaagcccgcgttccggaaagtattccggcggttatttgaagaggtggtgcggcagtgtgtggaaaaaggtctggtgagcggacggcttgcggtgacggactccacccatgtaaagaccaacacatccagagcctcagagcaggcaatagaggtactggaagaggccgggaactattggaagctgctggacacctatgaggaggaggggctggaggagctgaaacggcagacggggaagcgccgggcgaagcggacaaagcaggtcaaaaaggacaagcgccgttcccgcaagaaggtgagcggcacggacccggaggcaggttatatgaagcggcccggcaagcccagcggattttattacctgtctcaccagacgaccgacccggaccacggtattatcaccgctgtgaccgtgacgccgggggacgtccatgactccaggccctactagagtatgtccataaaaatgtcgttccgctgaacgccgctgcggcagactccgcctatgacttctcgctggcacactgggtgctggaaggattgggcattgacttttttgttgtgccccagcccgcccatgaccgcacgaaggctgaatttaagcgggatgtattcacctatgctgaacagcgggctgttctgggaatactgggcggaaaagaaagactgcggcagctgtcctttgcggcagaaatgtttgaatgaaacggacaaggccggcgccagaaagctccaggacagttatttcaagactgctgttcagcagcatttcttcaggcagtgggaatcggaataccgggaggcgctgaagcagcggcagatttggtgcgagggtacttttgccgcgcagaaatggggacacaacctgacacgtctcctgcgacgaggtttagaggcagcggaggaccactgcctcctttccgctgcggccttgaacgtcaaaagaatgatccgatgtctgaattgacgctgggaggagtcttttttcttgctctaaaccacgcttatctctcaaatttagcactttgccaacagctccaatttgtcccaaactgtttactctcgcgtagctcggatgatatatccctcgttgccgcatatggttcagaacagccgggcactgtctgtcaagggtacatagtactgccgttgtacgacggctacctttgactggctgtcctggctgttctattttatggcggacagggggatatcctccagagccacttcctttctcaatcttgtgaaagagcgggggataggttgaacatcaaagaaattgtaaggataaatgttccctatgagcgcatgatgaacgggtctatgccgtttcccggcagcactgcggtttgggattatgattcactttcacaccaatggtgaaggaataaggtgacggctaaaagatctgcacagccgccgggagacaaatttttctcgatgaaggtctgatccagccgggaaatagtttcccaatccggaagcggattatccgctaataaggcttgtacgttccgcatggcttggcgtgcttcttccaatccgcctcgggcgatcatattggtgtccgatacatgagcaatcaaataaagcagcgtgatggcagcggcatcgttgtaatgcttacctgccgtcagtgcacgacgaagaacgggaataccgatgcgggaaacagaagggaggcctgcggcaatttcgccgcgaattccctttatcccctgctgcaggtagagccgctgacctgtggtcagtttgaggtttccattgctgttcattgtcatggtacgaaaatcggcatcgattgcacgctgggtcatctgtgcgcacatatcgagaatcgcggtgaggttccgacagggctgttcggcgttccaaagtcggccaattgcaccgcagacagtgcccatggtaaaaatggcacctttgtgggtgttaattcccccggtagcctggaacatatcctgttccgcttgaatccccgttctgcgcaaacgggcaaaggtttcatcgggagaaagctccttggtttgctgtcccagggctacgcagcgggacaggtaaggcgataaagcagaagcgctagcggtaaacgtgaagatgtccatgtctttgtggcttccactgttcacacgatcgacgagcccgggtttgggtgtgacacatacctcgtctagcaggcttcgcagagccagcgttgagatttgacgctgatcttcctgctgaaaatgatggcataaaatttccattgtaactgcctgcaactgctccacggtgtgcaatcttcgggaagcgcagcggcgcccggatgctccgcagacgatgcagccccgagcatgtccacccacttcctcccggcgcagctgtgttcccgtttcgtccagcacgtccatatcaaatagcctgccaagtggggaagaatcttcgattccggtgcacagctttttaatcatatgtgcattagcgcgtacggcatagtatgcttcacaacccgtatgtttcagacgtgtttgctggcctgcgacctcgacatggtgctcatggaaagcagccaaaagcgtttgacagccaaagtgaaaggcgcggcggaccaagggggaatcttttttcggcccagcgatattcatcgtaaaacagaccaaaggaaggccatatgtatgtatgaactcttgttgcaggccagccctatattctcttgcttgaagtatctgttgtggtgtgacgcccatatgattgcctcctgtggtaatcaaagaaatcgaatgttttccagtgagccggataaatctctctgttatgctattatagcataacagattgctaaaacaaagaatggtaggacgaattggagcgtacgcctcccaaagatgacagggcgttgcagaaaaacatgcaggaatactgacaatcttattgcaactttaagttgcggtccttgccggtttttttgcttttcagatgcggtgatctgtgatattttaacctatattattaaaaatgaatgaagaaaatatatatattgcaaaaaaatagaatgtgacagacacatgtaaaagtttgaaattatgaaaagacgagaaaaagaagcaagctataggatatagcagaagaacctacaagtacgttgccgcgtttcagaggcagaaatgaaaggaaggactatatgaaaaatacaaaagcagactctgtgtgcccatgccaatccaaccaggatctgcgagcccaacaactggctacatggattgcgcaacataagcaggagccgggaattgcacttccagcactgcaaaaggcgcaggaaatctacggctttttgccggaggcagcgcagcgtgttgtggcgcgggagttggggaagtctctgtcggaaatttacggaattgccacgttttattccatgttcagccttaccccaaagggacggaatcacattaacgtatgcttgggaactgcatgctatgtaaaaggcggaaaccggatttatgaactgttgcagagtaagcttggaatacaagggggcgagtgtaccccagatggccgtttcagcttggatgcctgccgctgcttgggatgctgcggcatggcgccggtcattatgattaacgaagatgtatacggcagcttgactggtgaggaattggatgccattttggcgaagtatccatgagtgatatgtgaggcaggatgatgaaagagaacatacaaattcggaatctggccgcgcttcgggccatcaaggaagcgacgcttgccgtaatggacccggagaaaagtggaagtccccgtgtcgttgtgggattagccacttgcgggattgcggcgggtgcacaggatgtatatgatgcgctgaaaaatgaactcaaggcccagggaatggactacgtcctgttagaagctacaggatgtgtgggaatttgccagtttgaacctgttgtggaagtgtacattccccaccagcctaggacgacttatgtgcatatgaccccggataaagcggttcgagtggttcagcagcatctgcggggcggcaatccactaagtgagtatacaattggttccgtacagtaaggaggtgtgaggcgtgtacagaggatatattatggtttgctccggcccaaactgcgggcgtacctccgaccgtattgcagaagaatttgaggtacaaattaagattgctggtcttcgtcaggaaatacaggtcattcgcggcagctgtatgggcctttgctcatctggccccaatgtcattatgttcccagaggggacgatttacagccatgttcagattcaggatgcagctcgcattgtcaatgagcaccttttgaaaggcaatcgcgtagaagaactgctgtatgatgaaacgaaggtcacaaatacaacccgcggtttggatcagacggagtttttccagcgtcagacacgggtggcgttgcgcaactgcggagtgattgatccgcagaatattgaggagtacattgcagtggacggctatgcagcattgtacaaggtgttgacggagatgtctcctgatgaagtgatcgatacagtgctggaaagcggactgcagggccggggcggtgcagggttcccaaccggaatgaagtggaaatttgccagcggaaaccgggggcaggtgcaaaaatacgtttgctgcaatgcagacgaaggcgatccaggcgcatttatggatcgcagcattctggaaggaaatcctcatacggtcattgaagccatggccattgctgcgtatgccattggagcggacaaggggtatatttatgtccgggcggagtatccagttgccgtaaagcacctgagcattgccattgagcaggccaaagagcgggggctgctgggggagcatatttttgatactccctttaactttgatctagaaatcaaactgggtgccggtgcgtttgtctgcggcgaggagaccgcgctgatgaccagcattgagggaaaacgcggcgaaccgcataccaggccgcccttccctgcggtcaagggactgtttgaatcgcccaccattctgaataacgtagaaacctatgcgaatatctgtcagatcattttgaacggcccccagtggtatcagtccattggcagcgaaaagagtaaagggacgaaggtgtttgcgctgggcggaaagattaaaaataccggcctggtggaagtgcctatgggcacaaccttacgtgaaattatcgaagagatcggcgggggaatccctagaggaaagaaatttaaggcggcgcagaccggcggcccatccggcggatgtattccggaccatttgattgatacgccgatggattatgacaatttgcttgccattggcacgatgatgggctccggaggattgattgtgatggacgaagacacctgtatggtagatatttccaagttcttcctggaatttaccgttgatgaaagctgcggcaagtgtacgccgtgtcgggtcggaactaagcggttgctggagctgttgaataaaattacccaggggcaggggaccatggaggatctggaccgcatagaggagctggccagctttattaaaagcaacagtttgtgcggcttgggccagacggcaccgaatcctgtgttgtctactctgcggtattttcgggatgagtatgtggagcacatccagaataaacgctgcccggccaaggtttgcagagccttgctgacttaccagattgacccagcgaagtgcaaaggctgtaccgcgtgtgtgaaagcatgtccggcggatgccatcatcggcagcgtgaagaatccccataaaatcgacgtacagaagtgtatcaagtgcggcagctgcattgacaaatgccgctttgacgccatcagcaggaattaaggaggcgatggagcgatggaaaccttgaatagacaggatcagactatggtccacctgaccataaacaacatcccttgctgtgctcctgctggttccaccattttggaggcggcgcacgctgcgggtatcgccattccaaccctatgctacctgaaagaagtgaatgagattggcgcttgccgcatgtgtgtggtagaggtgcggggggcgcgcaatctggtgcccgcctgtgtccatcccattgcagagggaatggaggtatttaccaacaccaaaaatgttcaggcggcccgccgaaccaatctgaagcttttgttgtccatacataaccaggactgcctgagttgtcccagaagcggcgactgtgagcttcaaaagctatgccgcgagtatggcgtggataaccatatggcatttgaaggggagaagaaccactacgagattgataccactacgccgcatttgattcgggacaacagcaaatgtattttgtgccggcgctgtgtggctacctgcgagaaagtgatgggagtggaagctattggtgtgtctcagcgcggattcaagacccatattggaccgagctttgacgccatgctgaatcaaaccgcctgcattaattgcggacagtgcattgtggcttgtcctacgggcgctcttaccaccaccgtggagaccgatacagtttgggcggctattgatgaccctaccaaacacgtcataatccagacagctcccagtgtgcgggccaccttgggtgagtgctttggattgccggttggcaccaatgtagaggggaagatggttgccgctctgcgccgtctagggtttgacggtgtttttgatactgactttgcggcggatatgaccatcatggaagaggccacggagtttctccaccgctttgaaagcggccagcgacttcccctgtttaccagctgctgtccggggtgggttaaatattgtgaggagttctatccggaattcttacccaatctttctacttgtaagagtccccagcagatgtttggtgccttggcaaagacttattacgcacagaagaaaggaattgatcccaaagatatcgtctgtgtgtcggttatgccctgtacggccaagaagtttgagcacaagagaggagaccagagcgcagctggagaggaaattcgggatgtagatgtagcgcttacgacccgtgccctagggcatatgatcaaacgcgcaggacttctctttgaccagatgccggatgagcaatttgattctgctttggggattgcaagcggtgccagctatatttttggcgtgaccggaggagtcatggaggctgctttgcggaccgcagcggaggtactgaccggaaaaccgctggccgacccggtattccaggacattcgtggaacggaccagggcatcaaggaagcagagtatcaacttgtcggaaagaaaattcgggtctgctgtgtcagtgggattggcaatgcagctaccgtgttggaatggatcaaaagcggcgagaaacaatatgatttcgtggaagtcatggcctgcccgggcggctgtatcaacggcggtggccagcctacccagcctgcggaggtacgaaacttttggaacctgaaagcattgcgggccaaagcactgtacgatgaggatgaggcgacggtgctgaggaagagccatgaaaatccattggttcagcgcgtgtatgaggaatttctgggacagccgggtagtgaaaaagcccaccatattctgcataccagttacgtggaacgggattatgaatattaatcctgcccgggcagttcagaagcgcagccaaaagtcttgaaacagcggaccaggcggcagccggtactataccggccgccgccttttgatactggatagaagtgcaataacacggcccatcagacccggacgtacacatagccttccataatgcggcgagcagtgcggtctaaattgccgctgagaacggtatgggtgccgtcttcattttccttcaggtcagcgtaggcgtccatgatgccccacgggtggccgatgcgaatgtggggtgcacggttggaggggatcttgccgttgccgcaaatgatttcgttgacaatggtaccgggagtattggcagcggtaacggtgcagatggcgccggttcccatgtaagcgtcgatcatcttcatgttgacggagaaaaggcgtcccacaatgtcgatatcttctgcatggatttccgttccattgcctgcagtatagttgacgggcttggtggcaaaagcgatcttaggcaaggtttgactgttctttttagcatcttccaaatccttggcgaagccgaggataatcgcgccggttccccgaatgatttccaacttgcggcagatctcctgacagtcaggcagagcattgaattgggcaggggtttctgtgccggtcacgccaaagtccttagggtgaacaaagatgacagggttggcggcgtccacaaagctgtactcatattccttgccgtcaatttcaatggtgtcctttacgttcccggtgggcagcagtttgccggaggcggcaccctgggggccgacaaacttcagggtcactttcgcgccggttccgggtacgccgtcaatggcaaaatcgccctccgtcatggcgcgcccgtctttgacaggaacttgggcaataatttccttttgcgtattcgtgttaaaaatgtgtacctccgtgataggctccacagcctctaccaggccttcgtcgatagcaaagggacctacggcagaggaaatgttgccgcagttcatggtcttgcccacgatgggagcggcgatatccacctggccaaagtcatagtctacatcaatgccggggcgggaacttttcttgatgatggcgaccttgctggtggaggtattggcgccgcccatgccgtcaatctggcggcggtcaggagaaccaaaggcgctcagaattaccttatcgcgctgctccacatcctgaggaaggtctttgtcatggaaaaacacggccttggacgtgccgcctcgcatatagacgcagggaattttcacattgggtttgtattcagacatggttgtgttcctccttatggtttactgagtaaaacagggatgacaatattatgcgcactgtgctacaataaagaataacgctatcacggccggaaaaaggagtgagaattgtgctgcaaaattacgaatattttcttatgttggcggaaaccaaaaacatatctaaggcggcggaaaaactatatgtttcccaccagtgcctcagtcggtatttgaaaaatctggaagacgagtgcgggctgatgctctttcagcgaaagcccacacttgaactgacctacgcaggaaccgtcctggcagactctatgcgggagattcagcggattgagcaggatacccgtcgtaaattaacagatctgaaagacggttccaccggagaggttcggcttggtgtgacagaggggaggctgagaattttcctgcccgggctgatcaaagcctatcaggagatgtttcccggcgttatgttgcgggcagtcagcgcgccgaccaaggagctactggagctgctggtagacaataagctggatttggtactcggaagccccaccgaccgcgtgattcacaatcttgagtatcttaccatcatggaagaagatctctatttggtcgtgtcggattcgctgctccagcaatattttccagattcctatccggaatgcaaagagaagtttttcaaaggtgcagatattcgcctttttcaaaacgttccattttgtgccgctaccaagggatataattcccgcagtatcatagatgagttcttgcagacgaccaataccaccatccgtatcatctatgaagcaaaccaacccgacctgctccaccttatgacggcccacgactatgcggcgtcgttttctttgtccatgtacctgcctcatattcattccctgaatcagtccttggctgaaggacataaactcaatgtatttcccataaaggggctgagcagaaagaatccgatttttttgatctatcggaaaggaacctatctgcccaactataccaaggcactgatcggcctgatccaacggcaatgcaccgcttaccaggaaccgctggaccagcttttatggtaagagctgtgtcaaagcggccatatcgtcctgctgatccaggcagcggaactgctggaccagagacttggagcggtcggcggaaagcatggaagcggcgtttgccaggaatttggcctccagttcggcccagcccacaggattattgggagatcccttcagatcgtaaagttccttttcgtaggtacggccgtctttcaggatgatttccactttggccccgcgctgttgggggaattttgactgcaccgaggggtctactgcacaggtgacccgttctgtaagggcaaggtaatcgggattcgtgtagctgggggcggttaagtggccaacaccaaaacaatggtccatcagtgccactgcacttccataagcaaggctgaatttggcttggccagaattctgaggcgccttgatgataccggtcagatcgtaagccacctgatgggttccgatccagatatgctccacttgctccggggtgatttggtgctcctgcgccaaatccagcacggcctcaatacccggctgagcatggcgacaggaggggtacattttgttataagtatttgcgatggagtaaacaacacccaagtctcgaatcacatcgtccgcatcaacctgctcagattgcgtgtggaacagaccatcctttccttccaatgcactcaggcagccctccatattctgggcagccaggaaggcggccatgataccgctgtatgctgcgttgcctacttgtacacatttggagcgctggcctgagcaggttgcctccatggttccactggccagcataccggcctgtcccaggccgttggcgagctgtttttcattcaagcccatgagctttccggctactgccatcgcgccgaagacatcacagttactggagggatggaaacctttgttgatctgctttggattcatatgggatgcgatgcggtataccacctcataccccagcacaacagcgaccaggatctcccggccggagcgcttaaattcctggccgaggacaagggcagtcggaacaaccaccgcgccggcatggcaaccggcattcttatgcccgtcatccagctccactgcgtgggcgaaggtagcgttgatcatggctgcgtgggcaggggagtagatggcgtttccacccagaaccgaacaatggcccgtgcccaaggctgcgattgcctggcggaaggactgggcatattcccagttgcagcagcccgcgatggcagcgcctacggtatccataatgcgctctttggcttgtacaatcacgtcttgaggcaaatcctcatagttggtatgggcaataaaagaagcaaaatgttccgtcaaatacatattttgtccctcttttaattgcgagactcccttgggagtctcgcagtatgttatcattagcgctttatctggcggatgacatcaattaccgtgccatcccggtactctactatgcaggtgattcggtcggttgtctcaatcgccttcggctcgccggtcatggaagtggaaagttcgtgaagctgttgaatggagacgagtttgagattggttttttccagatcctctttcagctcctgatagtttctgtgcttgggattcagcgctatgccggcctcggtcacaactgccgcaacagtttcgccgggggtgcagagggtaaagacccgcttgacgatggagggggtacgaccacggataatgggcagtgtaacaatggagatcgctgcgccgccggctacatcagggccgccgcccaggccacccatcatttctccggaagagccagtgaggatattgacattgaagtcggtgtccacttccagtgcacccagtacgccgaagtcctcccgatttaaaaatccgcccttactgtatgcgttggcgtagtccgcattgtcgatttctaccacgtcttggcggtcatagatggctcttgcagccaccgcgtcaaaggactggctgcattcgactacgcggacaagtccctcatcatacatatcgatgatggccgcgggaattccacccagggcaaagctggccttaacgcctcgctcacgcatgcggtcacccaggtatttggtagtagcgatagaaatggcacctgcccctgtctggaaagagaagccgtccttaaaacggcgagaggcggcaatcagatccacggtccgctctgcaatgagcagatcccgaggatttttggtcagccgggcagcgccggcaccgatttttactggatcgccgatggaatcaacctgcaccacatagtcaacatactgctgagaaatgctgaccgggcagcagggatactccactaagttgtcggtaataacgatcgtacaagctgcgctttgcgcgtcaataaaggcgtaccccagagagccgcaggcattggggccgatttgcccggtacagttgccatagtcgtcggcggcagaggctccgataaaagcaacatcgatttgcagctctccggcctcaatggctctgggccttgcaccatgggtgcgaaggatcaccgggttttccatctcgccggccagaacagcatcgcccagctgtccacggattccgctggcctcaatgcgatcaatggtaccgtcttttacaaaatctgcaatagagggatttttaatgttgaccacggcgctgggcgcaaagcggagacctttgattcccagttcgcgaattgcagttaagacctgaccaatgacctggtcaccctcccggaagcagtggtggaaggagatggtcatcccgtccgttaatccggatgcggtgatagcttcctttagacttcctaaaagctttgtagagccgggaatacggtgaccggctgtgcggcgggtgatgaccgtgccttccttcgcgggggtgctgtatgggccggtataaggcctgaccacataatccccgattttttccggcagctcacgccccagactgttgattaacatgatgtgacaccccctgtcttaataccggcggctttggcctttgccagcacagcgcgtgcgcgcagttccatgggcttatccaccatgctgccgtccaaaacacagacgccggtacgatttctggctgcctcttccagtgcctctagaactctttgtgcgttgcggatttctttggctgtgggagtgaagcaagcgtttacagtgtcgatttgccggggatgcacacaggtttttccgtcaaagccgagggttcgtgtcatctcaagatcgcgcttgagtccttcttcatcgttaaggtcggaaaagactgcatcttgtgcggagattcccgcagcgcggcaggctatcagcacggcattgcgggcatagaaaatttcccagccaggtttggtgcgctgggcattcatgcttgcggtaaagtcttcggcgcccagagccattgcgacgacccgagggcttgcagaggcgatttcctgcgcattcatgacacccagataggattcgatgttgcaccagattttaatgcccccttcgggcagaccggcctttttctcgatggcggtaattttctcatccacccgttttacttcgctggcatattccacttttggaatacggatggcatcaggctgagcccgcacagcagcctccaggtcctcgtccaactccttggaatataatccgttcacacggatcaggatatactttcctttggggcgctgttccttcaccgcgtggtataccagcaatctggcggcatctttctctcccgcggagacagaatcttcaaggtcatagaccaggcagtcttcgttataaaatccggcctgaatcattttaacagggctggttcctccaacatacatggaggtccgcattaactcattgtccgacattgggatcctcctttccccagttaaacgggctgtctgtcgcccggcagacagcacattccattctggcacggatggcaaagtccagagcgcccttgtcattgatctctactatggcgtctataattgcaaattcctccaggacggaccggacagtagcctcaatggcatctccaaacagcgcctttacgtcgcttttcaggtcgatttgaattccctgaccggggtttggccggagcataatctgtacatcgctggattccagagtcccggcgacggccggttttttcagttccatatccttgccctccttacgactgagtatgggccttcatatattggaaaaggcctccggcctgcatgatgtcatgttccagatcgctgaccgcatcgccgtggaagttctccccggtagcggtatctacgatttcaccggtggataaatccacttccagggtgtcaccgtttttgattttgccctcttcaatggcctgggcaattcccttgacaaagagtaccgggtaaccgttgttgattgcattgcggtaatagatgcgggaacaggtttctgccagcacacagggaacaccggcatattgcaggcagtaaactgcgtgctcacggctggagccgcacccaaagttttttccagctaccacaaagtctccgggctttacttccttggcgaagtgttccataccgggataatattcaaaggcatactgcggcatctgcttgggatcagtctctgcaaggtatttgttgtggtagataaggtcggtgtctacatcatttccaaagacccaggcccgtccaatctgcttgctcatttgctgcacctccttagttcaaatagtctctgggatcggtgatctgtccgttgactgcggttgccatggcggacatgggggagagcagataagtgtggctgccttttcccactttgccgatgaagtttcggttgtttgttgccacgcctacatctccggaaggtagcgcgccgtagtgctctgcggtacaaagtgcacaggttgggttcgtgaagacgatgccggcttttaagaagtcaaataccagcccctcatgaatacactgcatttgtacttcggtggtgctgggggtgatgataacgcgggtatcgggatttactttcccacccatggccatcagcacatcatgggcggccttgatatcttcatagcggccgttggaacaggaaccaatatgcacctgatctacatggacaccggcaacttcccgtaccggctttacattgtcaggggcatcagggcaggaggccataggctccagcgtgctgacatcgtattccaacaccttgcaatattccgcattttcgtcagcggagagcatctttactcgctccaggacttcttcgcctgcgcgctccaccagccaatccagcacggtaccatttggcatgatcagggggactttgccgctcatttctgtaaccatggagcaaagggtgatacgttcggccagcgaggccttttcaatcgtttcgccgacaaattccacggccaggtaatccatgccgccggcccccaagtcgcctacgatttttgtgagcaggtcccgcatacacacccccttggggaaggagccttttacaatgattttcatggtttcgggtacccggaaccagctaatacccttgatgtatgccgctgccacatcagagttaccaacaccggtggcaaacgcacccaccgcccccagtagattcatgtggctgtcggtgcctaagatcacatcgccgggcttgaccagaccggcctccagcatgacatgctggccgatgccgtgattgatatcaaacaggtaagaaatgccctgacgctttgcaaactctcggatgatcttttggttgttcgatactttttcagagtgagagggggcctgaaggtcaaacgtaaaggcgaccttatccgggtcccataccttggcatcccggcccatttcctgttcaaattgcagcacacaatttgctccgccgaaatcacgggctgaggccagatctaccttgcaccagacccggtcacccacctgaacactccgcccggcggcccgttccatgattttcataatacaagttttacccaacgagatacactcctttcaaatggagagaggtcgatagcttctacccacaaaggactatgatatactgcaagaatgaggtgcccattgggtagagaccgtcgcactgtcccgctttcttcatcttaatgttacacggcacttgtgccacagaaaagcacattttttttgttgtgctgcacatttaagttgcatatgtcctttgcgtttttcttcaaatattggttggataatttcctatttaattggatttgcaaggatgtttctttgtggtaccgtaaatatggaattttgtagttgtgctacagctgtgcttgcaaaatgcggtgaaaaaatctttataaaaaccaaggaggagatatgcaatgagcaccccgacgaatcagctgtcctttaccatgccccccaatgcctgtaacgcgcatctacacattattgaccctgcttttcccaatgatggacatgcagcggcccagatagggacagttgacgcctatcgccagttggctcgggatttgaacctgccccgcgccgtgtttgtacaggctaagccctttgcattggataatacctgcctattggatgcgattgctcgtttcggcaaggaaaatgcccgcggtattgcggttgtggatcatacggtgaccaatcgggaactggagattctccatgaagggggagtaagaggccttcggttcagtgtgtggaacccaaacaatgcggttatcacaatggacgactgcctgcctttgagccagcgtatcaaagagttcggctggaatatccagctgcatatgagcgccgctcagattgcgtcttacgcagatttaatttcaagtctggagtgtaaggtagtgatcgatcatatggggcggctggattccaagctggggacatctgatcccgcctaccaggtgatttgccggatgattgaccgcggcaatacatggatcaaattatccggtccatatttgaatacctgtcagggggaaccctgggacgatgccaccagaactgcccaggccattgcgcagtttgccccccagcgcgtggtgtggggcagtgattttccccatgtgacggagaagaaaaagcctgaggagcttacgcttgtggagatgattccgctttggctaccaacagagcaggccagaaagctggccatgagtgaaaatccccaggagctgtatggtttttaaaaaattccatttgcggcaaggaggcgctcataatgatagagggatatcgaattgcacagataccgctgcactttcccgaggaacgagagcagttgagggcatttcttgcgcgccaccagctgcgttatgagtctgacattcaaagtgcgtttggcatttataatgaagaggatgtgttggtagggtgcgggtgtgcagccggatatttgatgaaatgctttgccgtggagcccgatttgcgggggcagaatgcgcttggacttctggtttcctatttgatgcaggagcgcttttctgcaggatattatgatctgttcgtcattacccgtgcacataacgaagaactgttttcccagtgttccttatttccggtagttcgtaccggtgaattggttctgctggaaaaccggaaggatgggccagagagatttgcctctgagttttggaaagacggagatggggaaaaacaggttggcgcgatcgttatgaactgcaatccctttacgatggggcatcttgcgctggtagagtatgcggcccagcattgtgatgtgctgcacctgtttgttgtggaagaggaccgctcggagtttcccacccgggtccggttgaagctggtacaggagggaaccaaacacctggataatgtcagggttcatctcagcgggccatatatgatttcagccgctacgtttcctacttactttttaaagaagggggaagatgccgccgcgctgcaaacagaattagacattgccctttttgcccagcgtattgcgccggaattaaacatcaagcgccgttttgcaggagcggaaccactggatgcaaccaccgcacgttataaccgctccatgagggagcttcttcccacgcatgggatagagttttgtgaaatcccgagggtggagcaagacggcacagtgatcagtgcctcgcgagtgcggaagctgctcaaggagaagggcgtatgcgatgaggtaattgctatggtagcaccgcccaccgcagcttatctgaaaagagaattccttggcgggaataaggcaacactgacttaaagacaaaaatatgcaagaatgcggtgagaatgaaacctcaccgcattcttgcatattggagaaaagaagaaatggttgaattatagaagcgcaccggaagaccagtggcgcaagatgatttcagagagaagttctgggtgagagcgtgcaatgtagggggtgcccaccggggctggaatggcctctaccacgccgttggcaatatacgctttggccgtttccaccagagcttcaggattgcgaaagcaaccataagcgagggtaagtgtggggacggacagccggggaagcatttctatgagaggggtatcttcaaacaaagcccaatgcaatgtctcacccagaattccagctgagtgtaaacagcggcacctggcatcacagatatctgcattctccccatatttaaagcaccgtgaccagagctctaaaagatggcttccatcttctttgggcgtaactacagagtattccggcagatttcgtttctgagcatattgaacgggatcgggggcgtaaagagggtgggctagaatcaaaccggcaatatgttcggggtaattaacacccaggtgaacgatcatattggcagtggctagatttccatagaggatagctttttgaatccccagctgctccataaaagagagaacggtatttgcgtgatcggataaggtatagtaccgtggaggcgcatctgagcttccaaatccaagcagatccggcgcatagacataaaatccagattgtgccagcttctcacccacaagctcaaattcatcactggaacttccggacatatgcagaaaaatgatcacattggagccggtcccggaaaagcgataatgcatctggccttcaggaatatccgtgtatgcacgtttcaaactgataccccccgtatcacatttactcagaaataatggtcacccgtccatccttacgaggcgccgctgcgggctttgggccggcagggtgtccaagtacgatgctgccgcagatttcctcgtcttgtccgattccgtacgactgcaggaaattgcggagaacaggattttcactcagccaatgtaactggttgacccaacaggcgcccaaactaagcgcggaagcggcaacctgcatgttttgcagtgcactggcactgtctgccataccgttaggccagcccaaaggagcacttgcaatgatcaccacaggcgcatggaaggaaaaatcgtagctatccggacgattatgtgcattgcggatcgcgatattctgatatagctcctcctgagggggcattttcagaaattcgcctcgaaccagggcggtgagctgatctaaaaggtcgcgtcgagcaagtgcggtcagatggaccacctgatgatttcctccattggctgcataaagtccgcattgaatgatttgatttaaatcgtcgggcgataccggctcgtcagtgtatttccgaatactgcggcggctcaaaatagcatcgatgatctgattcatgggaatatctcctttcgctagatgaaagcgggggagatgtacaaggtactgtcccctaaaacatgaagatgttactccttgatgccaagcgtttgataaatagcggggcgatttttttgggcattatcgatacattgcgcataaacactgttcccattagcatccattgcaacgaacaacggaccaaattcgttcagttcaaacttgaggcgctggttatccacgggcataagttctggccaatagtcatcgaccaacttggccgcgggggtataaacagcagagcatcctcccacaatggccaggtatacacagccatattgcttcatggcatccagagtggcctggtccataccgccttttccaatcacggcgcgaatgccggtggcagcgataaagggaggcgtctgctggttgaattttgaactggtcgtagcacccagagcgcgcatatcatatctgccgtcctcagttcggcgccaaattgtaccggtgttataaatcacaccgccatttaaattcataggaatttcctggccttgctccatccaatcaaggatcagcgtgtagtgatcggcgtagagcatggaataggcctcgccggagaggtagaccacatcgtctaattccagactgcgaatctcctcttccgagaggggggtatgcaagtggaccgtcttagacatgggaatcctcctttcgcatttgcttcaccgtgccgtctttgtagatacggcagaccgctttgcgtccaggccagcagttgatgttgactgccaccggcatccacgggcggtgagtgccggaatactctatgttgacagccaacgcggtagtatcgccgcccattcccatggggccaatctggctcatattcagtgcggcacgcagctcttcctctaattgtgcaatatctgcctcaggatggcgctgatcgatgggacgtgcagtggcttctgtagccaaacgggcaacttcttccagaggaccaccgattcccacgcctacaattaaaggaggacagggattggaaccagcccgtaggacagaatccaccacaaattttttcacgccttcaattcctacatggggcggaaagatctgcagtgtggaccaggtgccacagcctgcacccttgggcatggctttgatttccatataatcaatgctgttgtccagctccacatggatcagaggaacattagcggcagtattatcgccgcgatctttccgagtcagaggatgtacgaccatgggccgcatagggaattcctttttggtcaggtccctcaaggcaccgtcaaactcagcgcggatatctccagtaaagggaaagctgagggaggttttaacaaagaaggttggaacccccgtatcctgacaaatgacgatgcgattttccttggccttctttgcgttctcaatcaggatgtcgagatactgctgtccacggggattggtttcttctgctcgtgctttgaccagcgcattcaaaacatcaggctgcacttcggtcagtgctctgatccaaacttctttgattgcagagcgcaaaacttccggctggatggactccatgtttgcgataacctccaaaatgtaaattttcaccttaaagctaagatagacttaccaaaaatttaattacaaacggcataacactgaacaatccaatatagcgtacaagctgtaggactcccactcttggagcgtcgccgcccaaatctgtagcgatgagcgccatatccgatacgccggcgggaatggaaccaaacaagctggtagaaagatccagccggcaaactttgtgcaggaggaaagcacagaaataattacagatggttgtacaaattaaaacgaggataacaggtttgatcagtgttcccatattcagtacatcttcaatggtaacattgatgcccaccaagataccagtcaggcactgggcgcccaatttcagatacctaggcagataggcagtgccgcgggtgatattctgtccggctacggcgaatacggcgaaggtaagagcgccactgggaatgccgctgaactttccgacaatgccaaacacttcagccagacacagggtgatcaacatgttcttcgtggtgcgaagttccgggggcttggtttccagctttcgcgccattgcacgttgacgctccagttcttctttgtcgtggctaaagtattcacacagacgaaaagcggcttggggaagaatgatgatggcaaagagcgttcggatggtgtgaacaaccgtcgtctgagtggagttggcacctaagtcagagctgacgacagcaatatcactgagaccggcaggcatagcggagaccaaagcagtagccaggtccagctgtgtcactttgaaaagcatgagtcccaccaggatggaataaagcaccatggtgaaaaacatcagaatacccgcggccaatgtccgccgcaattcagccaggtcattccgggtgacacgctggccaataaatgcaccggcaacggcttgaagcacggttttcataaagcctgggaaggttccgacgccggtaatgatatttaacgcggcactgaagataatagcgccgatcagtgcgcctgcgggaatccgaaatttataaaagagataagaccctgcagcggccacaagaatcgttaaaagtaaattcatagcacctcagaccattttgaaatcaggtttgttgtttataacattatcataattcgcgtaatttttcatccaatgtgcacattaaaaaaaacggcacttttcctgcttttgtaggaaagtgccgtaaaaatcatattttaagaagtagaactgctgttcatcttatataaaagataggcaatatatagtgtgagacggtcccgtgtattgaaatagctgtaacccgtcagctgctcgatcttctgaaggcgatagcgaagtgtactgatgtggaggtggagctgattggcaatttgctccattttttcgttggcaaaactggattccagggttcgcatcaagtccgtaccgctgtatttatcatgatccaaaatcggattgatgatccgggtatagaaaatgttggattccacgctgtcccggccataggaaatcaatcctaaatcatagtaattgctataaagataaacgtgcccatttatatcaagactgcgcccgaattgtacggcctttttcgcctgtgcgtagcagtttgacattttggacagattgcaaacgggagcactgcacccaagatcgaaatgttcatgctctgtattagccaaagaggattgacattccgtcaaggcagaaagaatacgttcatcattcatttcacaatcatacgagatgagcacgatatattcacttccgcgcttaaaagaaatcacagaggggaaacgattggcaaaaacacgctgaatactgtctacggtataaaaccagtttcttatttgtgcttccacaggtctggataagaggagcagaagaaagaatttacgggggagaaaattgagaagctcaagccgctctgccgcatttctgtgatctgatttatcggagaacaggatatcgtccaatgtagctgagacaagtccccgtcgggcctgatgctcgagattttgctccaaaaacttgatactgattccgctgacaatagcttgagccaacgggatcacgacatccagagattgctcaaagacaacaacgcacagtgcggcagacatttggttgttgaccatgcacgggaaaatgaaaatgttgttttcctgaaaataagaatcccgctgcttatcgggctgaacaaaaaatgctttaatggcgcgataaacggaatcggtatcaaaatctgtagagagagaggaggtctcggcgaatttcttcccggtggggtcaaagcagcagcaatagcagtccagatgctgacacagtatatcaagtaaatcttggatggaacgattatgcataatggcgcgaatcagagactgatttaccgtattgatctgacgcagagtgtggcgctgatttccggtaatcagagaaagcgtttcacttaaaatttcacggaagtaggcatggggagaaatagacaataaaacaacgtggtattgctctgcgatagcaatggtagaagaatcgatttcgtttacaaatctgcccagcttgatgccgatggcagaaatacctgcctgacatagtccgcggataaaacagtttgtttcttccaaagagtcgtggtaattggaaagcgttgtcagaacaaaaattttatcacctaaattggaaaagttaatggaggaggcctctgcgaccgttacatattgaacttcgtttgtatatccactgccacaaataatagttgaatattctttcataattggcaactgtaaaagcatatccactgtgatactcatgaggtacttctcctttctgaacgaatgcgatagaagtcttaaagtgatgacttcaatcacaagatgacattatatgacaaagcttttatcattataacatatatttctgttaagatacaatatagattcagaaagcaaaaggggcttagaggccttggggaggaggagaaattattcagttgtagaaaaataggaaagtgcaagagaaatttcaaaagagtgtaggatgacggataagagaaaatgagctattttagtattgtaaagcgataatacaagtgactgatttgtatgaattgacaaaaatgtcatggaacatagaaaggagaaccgaaggtgaaaaaaggtattaagtctgtgggagcgtatcttccctacaactatcttaccagaatgacgcttggaaaggcatggggaggaaaaggaggcaagggcgaaaagagtattgccgatgtggatgaagatagcatcaccatggcagtagaggcggctatgggctgcttccggtttatcagccgtgaggatattcatgcactttattttgcaactacgaccggtccttatgcggaaaaggctcaaagcacattggtaagtgtagcctgtgatttatctgacgatacctttacctctgactttaccgctaccacccgtgctggtaccaacgctctgaagagtgctctggatggtgcggtagccaacgaggggcagaactacctggtgacagcggccgatacgagaaacggctatcccaagtccgctcaggaaagtggctttggagacggcgctgcagctgtggtagtaggtaccggagatgatttgattgcagaagtcgatcatttcaccagtgtcagtgaggagattaacgattactggcgtaatgaaggcgagaaatatacccgtcacgcagaaggccgtttctgtgatactgctggctacctgcaggaaatgaaccttgtactccggaagttccagcaggagactgggaccaaagcctcggagtatgacaaggttgtcctggtagcccagaatgctaagctacaaaacaaaattgcttccaagttcggaattgggcctgaaaagatggtggacacgctgttgctgaatgcgggagatactggtgttgcacaagctctgctgggtctggtccatgctctggagtatgccagtgcgggtgagaaaatcctggtagtggactatggcaatggagccagcgcattttctctgacggtaacagagaatatttccaagctggccggcaaagcacagattcagcgctatctggagaccagagcggagctggattcctatgctagattcttgtcctggagggagattgccggtgctgagcccggcggcgcctttaagctgcccgcttctacctctcagacctggcgtgagcagaatatcaatctgcggctgcatggcagcaagtgtaagaagtgcggtgcgactctctatcccattgctcgggtgtgtgatgcctgcggaagtctggatgagtatgaggaggttcgcctctccgatcacatcagcaagctgtatacctattccattgacaagtacgccggccgcagcgacgctccactgattgtccaggctgtggcagaagaccccaacggctgccacgtctataccatcatgaccaatgtgaagccagaggacgtacaggttggaatggatctggaatatacatttcgaaagatgcacgaactgggcaacttccccaactacttctggaagctgcgcccgctgagaagggagagtctataatatgtattttaaagatggatttcgtgatgaggtagccattattggcatgggatgttccaagttcggcgaacgttgggacaccggtctggaggacctgatcattgaggcagcctttgaggcttttgccgatgctggtatcggccctaaggatgtgcaggtggcctattttgccaatactgccgcacccaataactgctctggtaccccggtagccgatgctttgaagatgcacggtattcccattacccgaaatgaaaactggtgtaccgctggccatatcgccctgatcaatgcagtcctggctgttaagagcggcatgtgcgacatcgccatggccattggcgcggaaaagctgaaagataagggcgcaggcggcctgggcgttggccgtggattgaatcccgtgcgtgagactcgccgcgatgctcccggctccttcgcactgattgctgaggcctactttaagaaatacggtctgacttatgagcagggcaagactatgttggccaagattgacgtgaagaaccactttaatggttcgctcagtcccaaggctcacttccacaatgtgatcaccatggaacaggtgatgaatgcgcctctgattgcttccccgctgggcctgtacgactgctgcggcaccagcgatggtgctgcatgtgctattgtgactcgagccgatctggccaaaaagttccgggatgatcccatctatgtaaagggttttggctgctccacggatatgatcacgcctcactaccgttgccgtgattttgactggacaagctttgaggcactgcgaaattgtgccaagatggcctacgatatggccggaattaagaatccccgtcaggaactggacctggccgaggtccatgactgcttctctatcacagaaatgtgtatctatgaagattttggtttctgcgagcggggtaccgcttaccagaatgttatggacggcttctttgagcgggatggcggcctgcctgtcaatgtggacggcggcttgaagtgctttgggcacccggtaggtgccagcggcatccgcatgacttatgagatttataagcagctgcagtacaaagtcgataatcccgcccgtcagctcaaggatgtacatcgtggcttgtcccagaccttcggtggcccgcctcagattgcggcctgtatgattctgggcaatgaaaaaggataaaaattgaccgcaggaaaggagaagtatcgataatggcaggagtactggaaggtatccgcgtattagacatgggccgcgtgttggctgggccctctgccgctgcgctgtttggtgatatgggggcagaggtgatcaagctggagcagcctgggcgcggcgacgacagccgtggctttgcccccatgaaaaatggcgtcagctgctactataaaaattttaaccgcagcaaaaaaggaatcactttggatctgaaaaagggtaaagaaacatttttggaacttgtgaaacaggtggatgttctcattgaaaatttccgccctggtacgatggaaaagctgggacttggttatgaagaactgaagaaggtaaatcctggcctgatctatggctgtatctccggctttggttccaccggcccgtataagaaccgtgcgggatatgatactatgtctcaggcgtggagcggcgttatgagtatcactggctggcccgaagacgatcctgtgcggtgcggtgcctcctttggcgatgtgataggcggtctgcacctggtaatcggtatcctggcggctcttcggcaccgggagcgcaccggacatggccagatgattgatgtatctctgacggatggttgtgtcgttgcggctgccagtatgttcgaggtttatctggccaccggtaaggtgcctaccaaaaacggcaaccgttacacttcttccgctcctggcggaggttaccataccaaagatggttactgtgtaatcaacggcagtgcccctaagttctggggaatgctggtagagattattggccatcctgagctgctccatgatccccgctttgagacaaacgcacttcgcgtcaaaaatcgtgaggagctggatcccattgtggaggcctggactttggagcacaccacgcaggaggttattgacattcttcttcccaagggatttgcctgtgcaccgattttgaagctggaccaggtggtggccaacgagcagatcggcggcgcgcggaatatgttccccgaagttgacgaccctgaggttggacctacccgctttgtaaactcagccattaagatgcaggagggaggacctgagatccgctgcccggctcccactctgggacagcacaacgaggaaatttacaaaaatatcctagggtattcgccccaaaagatacaacaaatgaaagtggatggagttatttaattaagctggcttatatggctggactgaacatatgaggagtggaaggtattcatgcgggaacctaaaattttaattaccaataaaatcagcgacgcaggaaagaaaaggtttgaagagcttggttttaaaatggtctggtcagaaagcaaccgggtagaggatgtgaaaaaggtcatccaagattgtgatggaattgttgcacgcatgaccccggtccgacaggagctaatcgatgccgctccgaacctaaaaattatagggatgcatggagttggtttggatggcatagatgtggactatgctacggaaaaaggtattgcagtgacccgggcagcggctgcaaactgtgtttctgttgctgagcatgtcattaatgctatgctgaatttaagcaagaagaccatcccagctgattatgcgttgagggaaaaaaaccattttcaggagcgtgaccaatttatcggtcatgatatttcctgcaagacactgggaattgttggcctaggtcggatcggaagaaagctagctgaaatggcaggacttggatttaatatgcgagtaatcgcttacgacccctatgtttccaaacaacaaatgcagcaagtgggaaatggtgtagaaaaagcagagagcatggatgaggttttgactcaggcggattttgtatccttccatactcagttgactccagaaatggtgggtgtagtcaattatgatatgctgaaaaagatgaagcataccgcatactttatcaacgagatgcggggtgctctggtaaatgaggctgaccttcacagagcgctacaggaaggtgttattgcgggagcagcgctagatgtgtttgcccaagagcctacgcctgagggatatcaactattcactgcacctaatttgattgtcacaccccatgtgggggcttccacttatgagagcatggagagaacgattttagcactggcagaggaatttagacggttcttcagcggtgagaaactggaatttttagctaatcctgaatattacaagcattaatacaccgccataatggatcattttcaagtctgggggatatttacaatatgggaaaaacaattattgaaaaaattttttcggaacatgcgggaagagatgtggcggtcaacgaggatattttaatttatccggatcttacatgcgcctatgaactcccggcatatatggagcggtttcctgcccagatgaaggagtttggggtagaaaaaccaaaacatccagagcgggtggtaattggcctagatcactgctatcctggcggaacacctgaagaacaggaaatacacaagattacatgggcttttgttaaaaaatttggataccacattattgagggggagggtatcagtcatcaggttattgccgagcgcttcttaaagcctggtatgattgtgacccatcatgatggacacgcctgcttgtttggtgccctgtgtgctgccctgtttccgctaagtgcggggattattgagcctttggcgatggaatcactctatttgacctgcccacctacagtccgtgtgaattttcatggggcgctttcaaaaggtgtggcagctagagatgttcagatgtggatgcttcagcagattgggcctagcggtgcaatgaatgcttgtgtggaaatgggcggagacggctttgcaagcctgactatggacgaccgttttacaatctgcaatcaggtcatgttcctgggagcaaagacagcggtttgtgagcaggacgagcatacatggtcatatctgcgcaagtatggggtccaatgggataagtcatacagcccggatgccgatgcagtttattggaaaacttttgacattaatttggatgagatccctccgatgttgttggcacctcccaagcctgcaaatgtacatcgcattgatgatttcattggtcgtccggttcaagcgggattagtaggatcctgtgcttcaggtcggattgaggattttaagcaagtactggagatactggacggcaagcatgtcaaagaaggttttcgcctggtctgtgttcctagcactattaggctccaacaagagttggtagaaaatggaatgatggccaaattgattcggtgcggtgcccgtatgcattaccctagttgtgatttttgctatggaaagatggcacctctggcaactgaggagacctgtttagctgatgcgcagatcaatgctcctggtcggttagggagcaagcaggctgaaatttttaccgctagcccgtatgctattgctgcggcggcattgacaggagagattactgatccccggggagtattgtaagcagattgtgggattagagaaggaccgaatgacaacaaacgatttagaaataagcgttgtcaatattgtttgaggtgaaagatatgttaccaaaaatcaagggtaaggttgcctatgtgtttgatgaagcagattttgatacagacctgatctgcggaatggatacttgtacggttgccgatccggaaattctgaagcgggtttgtatgcaggatattgctccagattttcaaaaatatgtggaaccaggcgatgtcgttgtgtgtggtgaaaattttggatacggtcacccacatattggtggaccagtgggactgcaggaacatggaatctctgcatttattgcggagtctttttgcccgggattttatcgtgcaaatacgatgcgtgggacgatattgattgagtgtccggggattttgaatgaaatcaaactgggtgagcacattgagtttgactgggagaactgtcagttgtatctcttggattctggaagaaccattcagtgtaaaccgatgcctgagaaaattattcagatgattgaatgcggtggaattatggggtacattaggcaggttagattacaagagaaaagacagaaaaaagcggactgaccaagattattgatgcaggacaagtatatgtaatcacttggataagaaaagtgaaaatagaaacgataaaagagaaagagaggatcccccctatggagaatgtacaagtatatgttgccctagcaattattggtgtgacaattatcctatttgctacagaagcattcaaaacatccatcacggctatcctttcctctttggcaatggttttggttggtatcaatacccccaagaacctgacatccggcttttctaatagtgcgatgctattttgctttggcattgcagtggttggtacggccttgtctgaaacgggttgcttgtcttatttaagcaaacgtattatgtttatttctcgctttagtgaacggacagtactagtaattattttagctgcgacggcggcattctctatgtttttgtcaaacaccagcattgtgattatctttatgagtattgcagctatcttggcaaaaacttctaatggtcggtttaaagtgaagaatttctacatgggcattggtattgcagcggtagcgggtggaagctgtaccctggttggatccacggttcagctttcggtgaatgcggcacttccagaatttggtgtggaaccttttaaaatgtgggatttccttggccctggtgttcccatgattattttgatgctcttgtggtattattttattgggtataaaattcagcagaagagctttgattttcctgatccggatgaggaactggtgcagactaatgcggcggaacttcaggaaggaaatcctcgtagcattcggatgtggattccgctggttactctgataatctgtattgcgctgaccctgtatggatgggatatggcgctgtgcggcctgctgggagctatgattgtatgtgtatgccggtgtatcagtgtcaagcgtatgtgggctaccacagactggaacacactgtttaccattgccggtgctgtgggatttgccgcaggtattgataacagcggtgcgggtgtatttattgcagagaaatgcattgatatttttggtagagaatccagcccatggctttacttggccatctttgtgttcttggctgctattatgaccaatgtaatgttgaatatgagtgcggctttgattctcattcctattgcggtttccattgctcaggtgctgaattttaatgctgcgactattgttatgggaattatcatgggtgcaaatatgcccttctctactcctattggagcgaatcctattacaatgacattgcagggtggttaccgatttaaagattacaccagagttaatctagggttaaatattcttgcggctatttctgtggttattgctacaccggtgttcttccccttttaagaaacaaagatactacattgtgcgaattgaggaatgtgtatgacagatattgaacgtttggaaaaatttcaaaagctgaaggatatgataaatggtcctgaagctgatgagtttaaaaactattgggacggacggttttttacaggcgacatgacgtttgtttttgataaaactccatataatatgtacttttatcaggggacaatgattgatgtgcagattggaatgcctgccaacggctactatgtgggaatttgcggaacccaggaacagtgggaagcattttttgcccatcgtaacttccagttggcgatttcggtcaaacactgtgagcatcccttcgagcagttgggtagcgctttggcgaatcgtcagaataacaccattgtggctcaggtaatgcgtttggctgcaaaagccatttgcgactgagagagggggatgggacatggctattactggtggatatattatcgtaaatgggatcaagacatattatgaaacaaacaatggtccgcataacccaaaagggacaattgtagcgctgcacacagcgggcagagactgccggcagtaccacggtatgatggacctgtgggaggacaaattcaacgtaattgcatttgatatgcctgcccatggaaagtcttggcccttgcctggcaatgtgggtatcacagactataaggaatatggaaagtttgtctgggactttattcaggcgatgaatattaccgatcccattgtgattggctgttctgtggccggcaacatggtctactatattgctgagcactacccggtgaaggcaatggtatccatgcagggctctacctatatcaaggctatgggcagctcctacggcgcaacggtggatctgctggataatccttatgtgagctgccagcattcacactgggatttctccgagagtttgattggcagtaagtgtccgcccgaagcccacgaatttattatgtggggggtgtgccaggagtgtgggcgtaccaagaaggctgacttgtccatctacaataattatgacgtcacggatgatttgaagaagatcacatgtccttgtctcctcattcgcggcgaagaggactggaatgtacctgagcattattaccataccgccatggagggattggtaaacgcgaaaaaagttcagtttgtaccggttcccgggcatggccactttatcgcggtggaagcgcctgaagtgatttgcaaattaatcgatgaatttttgatggattgtcaatgattcaacaaatgagggggtagttttatgaaaatgctacgcagatttttagcattggccgtaagtatggctctggccgctagtttagtagcctgcggttccggcagcgggaccgaatccggtggtagcacagctggcagcacaccctcttctggagaaaaacgtgcgctttgtatggggacagggtcctccagcggtgcctggtacattattggcggcggcatttccaacgcagtgaacctgaattccagccagtttacgattacaaatgaagcttcttccggtggtggtgagaacctgcgtaacctccaggagggtaacgtggatatcgtaatgctcaattgcgatatgggttacttctactatacctcgactgactcctatgagggggctggcagtgatactctgcgcagcatgattgccatgccttcttctcccatgcacattgtagtgaaagccggttccggcattgacagcctggatgatctgaagggcaagagcattgccgtcggtactgcgggcagcggctatgaatcgtttgccagcaaagtgattgcctgtgccggcatgtcttatgatgatatgaaggtgcagatgatcaatccgtcccagatgcctgaagccatgcagaacggccagattgatgctttcttctatccggttcaggcacctggcagcgccattactgagttggctctgagcacagatattgagctgatgaacttaagcgaagagtttattgataagtttatgagcgagtatgtaggctatattgagtatacaattcctgccggtacttataatggccaggatgcggatatttccactttggcgactggccagttcattgccacggatcgggacaactttactgaagacgaaatgtatgccctgatgtgtgacatttttgacaaccgtgaggagtgggtggtgtctcacaacacttgtgccgagattaccgagaccaacatcggcagtctgattgttcctctgcatgtgggtgcagtgaagttttataccgagcgaggcgtggaaattccagaagaactgattcctgctgaggcacagtaagcggtgcctcagagcaattagtgattcttgattatgatacagagggagcttatgtaagctccttctgtatctatcacaaagaaaggagattttgcatgccgtcgggatgtatcattgactctgctgcatataaacgtattgctacgattatagcaatcataatggctgtattccaaatcattgtggctgggtatggttttatcgtgaccaatatgaggtgcgcgatccatcttacctttgccattacactggtaggaatgtataagcctgttcgctttaaaagtaatattctaacggatacatataatattgcatttactttattatcaatcgtatgcggcattttcctaacctatgagacgagagctgattatgctttgacctatacgctaaatggtccgagccaaatggatgtgattgtcggtaccattcttattgttatgattctgctgtgcgcgagacggacaacgggcaatgcgcttccgattatatgtgccatttttatactctatgcaatttttggccatcatcttcctggattgcttacgcacaaggagtacacctggcgcagtatcgttgacgttgtgatttttacaagcgaaggcttgtttggacagccactcagcacgtcgtcttcttatgtggcttcctttgtgatttttggcgcttttctgtctgcaacgggtgccgggcagtggtttatcgatatggcatattccctgacggggaaatttagaagcggaccagcaatgacagctgtggtatcctctgcggctatgggaaccatttccggtacgggcgtggcgaatgtagtaacgacaggcgcctttacaattcccctgatgaagtcctgtggctactcatccaagctggctggtgcggtggaggctacggcctcaaccggcggacagatcatgccgcctgttatgggagccggtgcatttatcctcgcggaaatgattggcatttcctatgctgaagtttctgtggcagctattatgccggcgctgatttactttttggccgttgcgttccaggtagattttgaagcgggcaaattgggcatgaaaggcctgcctgaagacaagcttttgcccaggatgaaaaccttgaaagagggatggctcttcctgatcccaatcgcagttctgatttgggctttgtgtatcatgggctattcggccaactattcctctttgtatgccattgcagttatcttactgattggattcctctttcttcccaaaggaaaaaaattaaatgttcaaaaggtatttgaggcgctggaaggaagtgccaaggacatgctgtctgttgctatggcttgttctgtggccggacttatgattggcgtactgaccaagactggcctgggcttgaagttcacctccatcttgctgagcgtttccggcggggctaagctgcctaccatgattctgacgatggtatgctgcattattctcggcatgggcttgcccacgactgcggcgttcatcatcacctcgactctgtgtgcacctgcgctgatccagcttggtattactcccatgggtgcatatatgtttgccttctactttgcctgcctgtctgctatcacacctcctgtggcgctggccgctttcgctgcggccggactttctggtgctaagccaatggaaaccggattctgtgcaacgcggcttggtttggccggatttttgattccgtatttcttctgctttactccggccatgcttatgcagggaagtccctttgaaattattcgtgtttgcgtgacctctgtaatcggaatttacttcctgtctggcggcctggaaggctttatgtatcggaatttgaatgttattgagcgtattattctcatcgtggcggccttgcttttggttgaaggcggtggcttgaccgacttgatcggtatcatcatgggtggtttcattgtttttattcaactgcggtatatgaaaaaagacgacaaggaacaagcgaaaaccgaggcgaagaacctataagtaaactagcatattgccgtttgagttgaaaaataatcactcaaacggcaatatgctgatgcgtacgttatttcaggcagagcatttgtacggagctacaaccataaagcggcctgaacgtaaaacatggtattcagtggatattattacaatatgagaaaaggaagtagattctatggaacgcaaaaaaggttctgctctggcgggattaaaggtgttagatttagggcgagtcatcgccggtcctttggctgcttctatgttggcagatatgggagctgatgtcatcaaggtggaaacacccaaaaccggtgatcttgcccggaacatgctgccgaaaaaggacggaatcagtacatactttgtggtgttcaaccgaggccaaaaaggtgttacattaaatctaaaaagcgaagaggggagagaaatccttctaaacatggtacgggatgcagacgtgctgatcgaaaatttccggccaggcgttatgaaacgactggggctttcttacgaggatgtgtcagcggtgaatcccggaattatttatgcctctgtgtccggatatggacaggagggagaatattccgggcgagcctgctttgaccctgtggcacaggccatgagtggtttgatgagtgttacaggatctgttgacggggaatgtgttcgctgtggagcctcgattgccgatgtgctggcagcacagaatacggtgatttgtattctggcagcgttggaatatagaagagtttccggcaaagggcagagaattgacattgcattgctggattcgtgcattacggcgctgtcgagcatcaaccagatctattttaccaacaataaaattcccaaaaatctgggcaatttctttgaggccagcgccccaggaaatacgtaccccactaagagcggggaaatggtcatgatcagtgcgggacaagccaatgcatggccccaatttgcacatattttgggccatgacgaatgggtggaatggcctgaatttaaaaatgtggaggaccgagttcgtaaccgtaagctgttggatcctctcattgcgcaggagactgtccgatttgacaaggaggaactactgaatcagctggcgcaggccaagattgctgcggcgccggtacagaatgtggcgcaggtggccaatgacccatatttccgggatgagcgggagatgtataccgaagtggaacatcctcagctaggcgcagtacgaatcaccaatgctgctctgaaaatgtctgaaacgaatccttatgtgcgcggatgcgctcccctgttgggagagcacaacaaggaaatctacagtgctatgggatatacaccggagcagctgcgtgagtgggaagaaaaaggcgtgatttaaattggaactggaaaagaagttatttctgccttcttgtgcagactgcggtatgaaggggtgtagggggcaagaaaatcattatccccctttttgccctaccaagggcgtttcagagtccctaaaaggtgagacagtgagctgccttcagggagaagaccagcgtgtggctatggcctctgcactggtggaatatgagggctatggagcctggtgcagaatcgaagatacgattgcatttgcccggcggatggatgtaacgcggattggtgtggccacttgtttggggttgttgcaagaggcgaagcttctcacccaggtgctccgggccaggggctttgaagtatatacggtttcctgtaaggttggagcagtgaaaaagacggaactgggcctgccggagtgctgtgatatctgtgggatgaacatttgcaatccggttttgcaggccaagctgctgaatcagcaccagactcaactgaacattgtatttggtctgtgcgtgggacatgacagccttttttataagtattctgacgcgatttgcactactttagtggccaaagatcgtgtgacaggacacaatcctgtggttcctctctatcagctgcaatcttactacaagcgtttgatggaggaacctgttccggttcgccgagtttctcaaaaggaggaatcggtttgatcgacgcgcatgttcattgttttcctggcaatctggcaccccgtgcactgtcgaaaacaaatatgtacgggacatatgaaacagatggaacaattgaagggcaacttcgtctggcgaaacgatatgccatcgaaaaaatcatggttttgaacattgccaacaaacctgaacagcaggagcatgttaatcaatatgccatatcgatcaacgggctggaagataaggtggtttccctggggtcagttcatccctttgcacccaatgcggtggagaccgtagagtggttgtatgagcagggaatcagaggaataaaatttcagccgattcggcagaaattttatatggatgatccgatttgccgcccaatttttcgcaagattggagagcttggaatgctgacggtcattcatggtggacggtccatccgcaccgagcatttccatgtccttcctaaagcgattggccgttgcatcgatgaatttcaaggtgcacctgtgatttgctctcacatggcaggaatgttttgcgccgaggacgaaatcaaaaaacttgccgctatgcctgtttatactgatacggcactgtgtgcccggcatctggatcaaaaaaagtttgattgggcggcagagcagtttggcgcagatcgtattttatttggtacagatatgccctgggcgaatatggaaaaagaaatgtcctatattcagaaatcgttcttcggggcaggagaccaggaaaaaatttttcgtgggaacgcgcttgccttgttcgagcgctgtgggatgataccgcatctgtccatatcaaattgtttggactgagaggagtctttataaaaattacatggttaggacattcgtgttttaagattgaatccaaaggataccagatcatcctagatccctatcaggatggcagcgtacctggttatcgtccaattgctgagtaggccgatcaggtgttgtgtagccatgagcaccgggaccataacggcaaggaggcagttactctgcgccagggtatgaattccccgtttacagtaagaaccatcgacacatggcatgacgatcagcagggaaccctgcgtggaagcaatctgattcatattttggatgacggccagtttaccgttgctcatttgggagatttaggctgcgaattgatgcagtcacagatcgaggaattagaaggccttgatgcactattgattcccgtcggtggatactatacgattgatgccgtccaggcccgggctgttgtagaaaagctgcggccgaatataacggttccaatgcactatcgcggcgagaactttggctatgatgtgctggagacagtcgatgcctttgttacagtggagaatcctgtagtgcgctacggcagatcttggatgaacttggataagaattccagttctcatattgcgcttctcgagccgcaaaataagccggtgtagtttgaaattccggaagtaaatggaaagaaacacatgccggggcgtaaagcaaagccgccgttggaagccgtctggattccaatttcaatatatagtatatagatttcccaatcttttcttagcgggaaatcagaacccacggcatagaaaaccaacaggaaaggtgctccttgtgaaaaggggcacccttcctgtgataaagccagaaaaccgtctgtagtatttggcagtcgcctgtgaaatcaaaattgtaaaatttgcttcttacaacataaagcaagaagaattcgctatttttatacgaaaacagctgatttttagcctgagtagcggaacttgtagccgatgccctatgaatccgaaggactctgtgaaattttctctgctttttgtggttgctttttagcgtttcatatccaatccgctctttctcagaactctttgaacatagtgtttctatggtgatcagaggcggtgtgtggtaggttctgtggtcagaaacgctcccccattctttggcagaccatttctatgtgttttgcgacgctatgggttgacacctgtcgcccagcaccgcgtactacaacttcaagcgcatcgccaatgatatcggtgtgcctgacacacggcttcatgacctgagccacagctacgcagtggctttcttggaggctggggacgatatcaagaccgtccagagcaacctgggacatcacacagcatcctttaccctggatgtctacggccatgtgggtagtgtcaagagtttttcgcaaattggtttgcagcctttgggatgaatgaagtcagccagcaatggaggtgtcctcaagggtcgcctccaggtgcttcatgttcatgtacttcttattgccccactgggtgccggccacatggtgcagcctggcacagaccagcatgagagcagaatggccgtccgggaaactgcctaccacacgagtgcggcggcggatctcacggttcagcctctcaataacattgttggtgcggatgcgagtccagtgctcgctgggaaagtcacaataggtaaactattttttacaaaggcataatgccaagtgaagtaggttttagattttccagtggattgtaacgctctcactggttgcgtcaatgtgggatatgagaatatcaaccaccttgcgcttatcgtcaaaactcacggactcccaatcgttgaggtaattcgtgatacagtcaatttgcgtgtccgaaacggaattagcggtgagatcggccaccagctttaactgcttttgccgttccgcatccagctcctcgatcctattgtttgcgtattgcaggagcagcgggtttgccccggacaacttggtatgctcccaataaagcagacaagaaaataatattgggagggagtatagatgggcaaacgaaaagagcttagcctcgacgagaaagtctcactggtagaggaatgccttacggggcggctgcggatgcgggaagcggcacggcgggctggtgtggggcactcaaccatggagagctggatcagccggtaccgctcggaggggatctcggcgttagaggagaatggaaaccagtcaaagcggcgatacgatgaggacttcaagcgcaaagtagtgaaggcatacatgtccgggcagggcagcagcatggccattgcggaaaagtatcagcttcgctcggggaatctggtattggactgggtaaaggcgtatcatgaaagaaactccaaaaaagagacggggggttctgtcatgagaaaagaacatacggtggaggaacgactgcaggcgatgctgtcctgtctggacggcgggcagccgcttggggatgtagcgcaggcgtatcaggtggagaaggcaacgctgcggagctgggtgaaaaagtaccgggagtttgggtcagcaggactggaagatcgccgcggccaccggctggcggatcagacaccccggagccgggatgaggccttgcggattgagaatgcccagttaaaacaggagaatgaattgctgaaaatggagctgtatctgcgaaaaaaagtgaaggagttggaaaggggggatcactaaggcagttccggcaggagccgcagtatgaagcggtgcgccgtggtgtggaagacgaaggttttcctgtaagtacggcctgccgtgtgctacatgtttcccgggccggctactatcagtggcgctccggggaagccgggatccgtgtcaccgagaaccaatgcattgccgggctggttggagaaattcaccgagagagcccggacaagggataccgccgtattcgggacgatttggacaagtattaccatgcgccggtcaacgacaagcgggcgctgcgcatctgccgcagcctgggaattcagtctgcggtgaagtatgcaccccggggctgcacccggtcggcagcctctcccaagcatctggcggagaatatactgaacgcaactacgtaggccccactatgcacaagctctacctaagtgccatcctggacctgtgcgaccggaggatcgtctcctttgccatccgggatgccaatgataccgctctagtgcacagcactctggaccaggctttagaaacaaatcccggcgtccatctcctgctccacagcgaccggggcgcctataccacccagatcttccatgacaaattgactgcggccggcatcacccagagcatgtctcgggtgggaaagtgtactgacaacggtcccatggagggcttctggggcctcctcaaacgggagcgctactatggccggcgcttcaccagccgggcagagctggtcaagatgatccgggagtacattacctattacaacttccgccgcctccagcgcggactgggcgtacggactcctatggaggtccatgactgcctactggccgcataaagacctgtacctgctctgtatggttggtaggcagaaatttcatgcgtaaagtgtaaattatttccctgtctacttgacggggggcacaccactttgtccagaacaccaggggacggggacttgccacgggccgccttgtcagccttggccgggcggcctgtgcggggccccggccccttttccgctttatccgcctggggtacagcttcccagacatggtttgctgtctcctttcagaatggtgtgtcgcgacttcattctaccagaggtatgcaaaccatgtctctttttgtttttgcgaaacttattctacctgacccgaaaagggaaacaaaaagggaaaatgaaggctgaaaacaacaaaggagccttgaaacccaacagtttcaaggctcctgaggtggtcggagtggaattataggattccacgaaatgagaacaacaaaaatggtattcgggcaatcggcaatcagtatttccacaacaaataaaactaaacttctattgagacggaaaggccgctaattttggagatcagcggcctttctctgcattcctatcctacgatttcaatttccttcatttgctggatgagttcatttactctccgatatacaaaattccgcccctgtccggcaccacagttaggatgttcacacacattcatcaagtatgcgctacccacagttttgctaaatgtatttctgaattgatggggatatttttgtaaaagcatcttatcgtattcgggattgtcaccaactacattcaacccatagtattcaattgtgggatctgccatgtgtgcaaggacttgttccatgctctggcttttcatcagacggttcttgtcccaaggataaaccaagtcgtctgcggtatcatcagaaaatgtaatgtaggttaaaatattagtgttccggtggcagcggtaacattccttcttaaaggagtaaatcttaaaaggcagagaagctgcatcctcgtcatggattttaacattatcagaaaaatagccgtattcttttccaccctcggtgaatgtaatgtatgttttttctccatcaatacggaaagaaaaagctgtcttaacctcacctgttttcagattagtgaaagtaatcatatgtcaaatactcctatgtaatgtgaaaatgttgatggaagaactaatgaccagtcaatcggtcaatacactattgtaccatgctttgacacgttcatagtaatcgatgatatctgtcatatcggttcgatcaatctgttcaggccaattctgatgtttctcggagaacgtggcaaatttaatggcattatcatagtaaccagaacaagcgggatttgtgttcatcttttcgatgcactcggcgatagatatgtccttgtattcatgatgattacgccaaaactgaggccaatctaacatcatagggcttagaaattccgactttttgtcattatctttaatgtttcctaagtatgggataaagtaacgattatataccggatgataattgttgaagctcctgccaaatgctacgccgatcgcattttgcgccggctcaccccgggcagcttctaccaacggcttgccaaaaaagattgattggtgcttattcatagtggccataccggtggagatacatccacggagaggaataccagctttaactgcctcgcagaagaactccatgcacacttgcagaaaagacagatagatggggtgctcttggaaaaatagcgaacaaaactctgtgttcttttctccaatcagtaacggatacggttcataaaaagaatcccggagccaccatgatggccttttgaacagatagtgcgtgtaaatcaaaaaggtatcactaaagtggcatacatgaatatatccatttgcatctgcaattagctgattgtttttccaatcttgagaaacgggcacaggaacaacactgcccgcaagagttccatttccggagtagttcgactccattttatgaatgatatccaaaagcttattatatagatccagaacgatttgagttccgttattttgaaccaaattggaaaagccaaggatatcaaaaagtgcgatggaatataattgttcttgttgctcaatatctcgaatggcttgctccattgcatccggagatgtaattggtaaccgttcttcagcggaaggtatctcgtgatttttcatggtatcccctcgtatttctttggaatcaggttcattatatcacaattttgcaggattgctattatagtttatatgattagaacataagcgccgtccaacaggacaaagggcgacacttttcctttctcgacttcgggacaaatttggtgtgccccccgtcaagtagacagggaaataatttacactttacgcatgaaatttctgcctaccaaccatacagagcaggtacaggtctttatgcggccagtaggcagtcatggacctccataggagtccgtacgcccagtccgcgctggaggcggcggaagttgtaataggtaatgtactcccggatcatcttgaccagctctgcccggctggtgaagcgccggccatagtagcgctcccgtttgaggaggccccagaagccctccatgggaccgttgtcagtacactttcccacccgagacatgctctgggtgatgccggccgcagtcaatttgtcatggaagatctgggtggtataggcgccccggtcgctgtggagcaggagatggacgccgggatttgtttctaaagcctggtccagagtgctgtgcactagagcggtatcattggcatcccggatggcaaaggagacgatcctccggtcgcacaggtccaggatggcacttaggtagagcttgtgcatagtggggcctacgtagttgcgttcagtatattctccgccagatgcttgggagaggctgccgaccgggtgcagccccggggtgcatacttcaccgcagactgaattcccaggctgcggcagatgcgcagcgcccgcttgtcgttgaccggcgcatggtaatacttgtccaaatcgtcccgaatacggcggtatcccttgtccgggctctctcggtgaatttctccaaccagcccggcaatgcattggttctcggtgacacggatcccggcttccccggagcgccactgatagtagccggcccgggaaacatgtagcacacggcaggccgtacttacaggaaaaccttcgtcttccacaccacggcgcaccgcttcatactgcggctcctgccggaactgccttagtgatcccccctttccaactccttcactttttttcgcagatacagctccattttcagcaattcattctcctgttttaactgggcattctcaatccgcaaggcctcatcccggctccggggtgtctgatccgccagccggtggccgcggcgatcttccagtcctgctgacccaaactcccggtactttttcacccagctccgcagcgttgccttctccacctgatacgcctgcgctacatccccaagcggctgcccgccgtccagacaggacagcatcgcctgcagtcgttcctccaccgtatgttcttttctcatgacagaaccccccgtctcttttttggagtttctttcatgatacgcctttacccagtccaataccagattccccgagcgaagctgatacttttccgcaatggccatgctgctgccctgcccggacatgtatgccttcactactttgcgcttgaagtcctcatcgtatcgccgctttgactggtttccattctcctctaacgccgagatcccctccgagcggtaccggctgatccagctctccatggttgagtgccccacaccagcccgccgtgccgcttcccgcatccgcagccgccccgtaaggcattcctctaccagtgagactttctcgtcgaggctaagctcttttcgtttgcccatctatactccctcccaatattattttcttgtctgctttattgggagcataccaagttgtcccaaagtggagcaaggcaagagggtggcaccgctgagggtgccacctttctgcgtttccccacgggacaagggggactgccgatcattgtttcgtatcgctctggaaggaggcccacatggaagatcccgtacccgtcaaggaggaatacacctatcaagttggcaaaatccaattcattgtcacgcccgtctacaaggacaaaggcgagtccatgcgtgacatcctgttgaagctgatgctggccgatctggagccagcctaactgttccatcgacatccttaacacgggcagtcggcagaggtataatatacatagataagaacctcttgcttgattgcaggaaggaggatattttgaaacagtcaagcaagaaaaattctaccggcacagccgctctctactgccgtctgagccgtgacgataacatggacagcgagtccaacagcatccagaaccaaaagaaaattctacaaaaggccgccaaagacaagggctacacggacactatctttttcgtggatgacggtattaccggcactaccatgaagcgccccggctttcaaaagatgatcgccgcaatcgaggccgggtatatctcggcggtgttcgtgaaagacctctcccggttgggtcggaactacattgaggtgggaaagctcaccgaagaatttttcccgctccatgatgtgcggctggtggccgtttccgatggcgtggacagcgacgagggtgaggacgatttcaccccgttcaagaacattatgaatgaatactacgccaaggacatttctaaaaagcgccggatcgtcaataagatgaaaggtaacgctgggattccgctttcgccgccgccttacggatacataaagaacccggacgatccccggttttgggtcgttgacccggaggccgccgaggtggtacgccgtatctaccgcatggcgctggacgggtacgggctggctgaaactgccgctgccctcggtacggatgggatcgtcaacccaacctactactggcgcagcaggggtacaagcaggggcggctccaaaagcaccgtggagcccacaaaatggggacacaccacaatcaagaagattttgaccacgcaggaatactgcggtgatgtcatcaacttcaagagctattccaaatcctataaaatgaagcgccggattgagaacccggaggagaaccgggccatcttcctcaatgtccatgagcctatcattgaccggccaacttgggaaaaggtgcaggcattaaaagccgggacacggcgcaagcgccccaccgttacccaggagcccagcgtcttttccggctatctgaaatgcccggagtgcggtggcaatctgaatttccattttaaccagggcaaccacgatattaaattctttagctgccagaaccacaattccgggctccgcaaatgctcgtctacccactatatccggctggacttcttggagcaggtcgtgctctacgagatccaccggctggcctgtttcgctaatgaatacgaaaacgactttatcaaggcgatggtgggccgctccgccaaagtagcggaaaatgaccgggtacgcaagaagcgggagctggacgggctgctggcccgggacggggaactggatatgctctttgaacggctctatgaggacaatgtgtccggcaagatcgacgatgcccggtttgccaaaatgtccaagcggtatgagcaggaacagggcgaaaacgccaagaaaatcaaggccctgcggctggaactgaaaaagctggaagataagcggctggatgtggacacctttctggaaacggtgcgccgctacacagacgccaccgccatcaccaagcgcatggttgccgagctcattcagtacatcgaggtctatcctgcggtcaaggaggacggcattaccaatcagcgggtgacgatccagtataactgcatcggtgcctttgaggtgccggatcgccggaagatccccgagcgggatattctgctggaaacgagaaaaggcgtagcattaagctacgccccggcggtgtaaaggtggtgtgggatatgatagcatttctctattgccgtgtcgcccatgacgattctttcgcattggatcaccagcggtttctgctccagctctacgcaaagcaggcgggatatactatcatcggcgctgcggatgaatacggcagcgggctcatattagaccgcccggcgctccagaaagtgaccgaggccgttgtcgctggcagggtggatgtggtgttagtccatagcctgacccggataggccgggagtgggggatgacccaaagctacattgacctgctcacccggcacaaggtaaagctcctgtgcatccgggatcggctgctgttcgatgaaaacggcgctaccccaattttgacaataaaaaatgcggagtgcccttcgtaggatactcagatcctataaggacactccgcatggtcggagtgccgggattcgaacccggggcctcttggacccgaaccaagcgcgataccaaacttcgccacaccccgatgcagttagcttatctattatattttcttttctaagatctgtcaagaggaatatagcatcttttcccggaatagattgggggtatccatcaaacaggacagggaggggcatctatgtacagccagtccacacaggcggcgcgtcggaggagaccggccgcgcaggggaggcgcacagggaaacaggaggagagcggcaggagggagcgtgtccggctggtccagctgctggcgtgtctggcactgttcctcaccgtgttcatcggaaagggagtctttccccagcggctggaccagctgggggaggatatcctggcgctgatcggctccaacactgatttccgggcggcgttttccgacctgggtgagtcgctggcggagcaggactccgtgctgggagacatcggggagttctgcatccaggtgttcgggtccgggcaggactccggcggagaggcctctcccgccctggctggcggggtggaggaggagagccgcttccttaacagccggccggacatggcggagctcaccgcccactatctgcggctggaccgggtgcccgacagctggctgccgggggagcaggcggagggagaggcagcccagcagacaccgcaggcccagacggcagcgcctgcggtgggaacggtgctgctgaaagccaattataacggcccggagttgccggccaactatactatggaccagatctccctgggggacctggagaccgtgaccccggtgttcggccccctctggtccacctacggctaccgggaccaccccattgacggagaatacagatttcacaacggagtggatatcggcgcctatcagggggaccccattctggcattcgccgcaggcacggtggagtatgtgggggagaacgacgaccacggactgtatttccaaatcgaccacggcaacggcatcaaatcattttacgcacattgcagcaggatctgtgtgaccacgggacagaccgtgtccgcgggggagaaggtggcagaggtggggtccacagggaactccactggtccccacctgcacctggagctgaaatacgcggggacccatctggacccggcatactatatcgactacaagcaggccgtctgagtggggcgggggaggatcacggtcacgcccggattcctgttcctgatggcctggtgcaactatgcggaccagcaggggctcctgctcccggccctggcagggtgcgcactccacgagctgggccacctggcggccatctgggggctgggcggatcggtgcggcgcctgcggctgacggctgtgggggcggagatccagatggagcggcccatgtcctatccgggggagctggcagcggcgctggcgggcccggcggccaacctggcggcggcctggctgtgctgccgggcagagggcggggccctcttcgccgggctgaatctggcgctgggctgcttcaatctgcttccagtgggcaggctggacgggggacgggcgctgcactgtctgctgtctatgtccatcgggccggctgcggaggaggcggaggcggtcctggaccgggtcctcatcgcctttttgctggcgctgggcgtgctcctgattggctggggaggcagttttaccctcctcctggtggcgctctggctgctggcaaaagaaaaagaggggaaaaagggaagaaataggtcttgtcaagggcttcagaaacgggtaaaatggttcctgcactcgaaatgagagttacctggagggacatcatgaaccggacactggagcgtattctgccaaaagtacaaaagcccgcccgttacaccggcggagaatataatgcggtggtgaaggatcgggcccaggtggacacccggtatgccctctgctttccagacacctatgagatcggtatgtccaacctggggatgcgtatcctgtatggggccatgaaccaggttgagggcctgtggtgcgagcgggcttttgctccctggggagacatggaggaggagatgcgccgggagggcatccagctgtacggcctggagagcggcgatcctctgtgcgactttgacattatcggattctcgctgggctacgagatggcctacaccaatgtgctgaacatgctggatctggcgggcctgcctctgcgctcggaggagcggcgggacctggccccgctggtggtggcgggggggacctgcgcctataacccggaacccctggccccctttgtggacttcttcgtgctgggggagggggaggaggtcaccctggagtacatcgccctctaccgccgggcccgggacgaggactggaccaaggaggagctgctccgggaggcggcccgcatcccgggcatctatgtgccctccttctacgagccggtctaccgccccgacggaacgctggaggagatgcgcatccgggagggctccggcgcgccggagctggtgcgcaagcgggtggtggaggacatgaacaagtcctatttcccggtgaagaccatcatcccctctacagagatcgtccacgaccgggtgatgctggaactgttccggggctgtatccggggctgccggttctgtcaggccggatacgtgtaccgcccggtgcgcagccgggaccccaaacagctcgcagagtatggaaaggcggcctgtgaggactccggctatcaggagatgaccctgtcttctttgtcctccaccgactatccctgcctgctggagctgtgcgatgacctgctggactactgcgccccccgggacatcgggctctcactgccctccctgcgggcggacaccttctccatgaatctgatggagcggctccagcgggtgaggaagggaggcctcaccttcgcgccggaggcggggacccagcggctgcgggacgccatcaacaagaacctgcgggaggaggacctgctccaatcctgccgcaccgctttcgccggcgggtggagcggcgtgaagctctacttcatgctgggcctgcccaccgagactgatgaggatgtgctggggatcgcggatctggcccgcaaggtctatttcgcctggagggagtacactcccaaccccaagcggggggtgcggattacggtgtccacctcctggttcgtgcccaagccccacacggccttccagtgggaggcccagatccccgtggaggagtaccagcggcgggtgggcctgctgcgggacgccctgaagcgggacaagtccatcacctacaactggcacgacccccagaccagttatctggaggctatcttctcccggggggaccgccgcctggccgacgtgttggagtgggcctggcagcatggggccaagttcgactcctggagcgagtatttcgactaccagcggtggatggatgccctggaggcctgcgggctggatggggacttctacgcccaccgggagcggccgcgcagcgaggtgtttccctggtgccgcatcgaccccatggtgacccccgctttcctgtggcatgagcgggagctgtgctaccagtcccagacaaccccggactgccgcacccgttgttccggctgcggggccaaccgtctgctgaaaggaggggtgtgcaatggctgaccgcctgctcttctccaagactgggagagccaagtacatctcccatctggacctgatgcgcaccttccagcgggcctttttccgctccggcatccagatcaggcacacggagggcttcaatccccaccccttcgtctccatcgcgctgcctctgtcagtgggctactccagccagtgcgagatcctggagttcgggctggtggggggcgcatcctatgaggaggtgccggcgcggctcactgccgccatgccggagggcatcgtgatccatagctgctatccggcccagcggccggtgaaggagctgtctcgggtcaactacatcatcaatatggagtacgaggaggggcggcctttggaggcagagaccgccctgagccgcctgctggggcaggagagcctggtggtgcggaagaagtcgaagaaggccaagaccggcttcaccgaggtggacctgatccctctgatctacagctggaacctggaggtgcagcgggacaccatgaccctggatgcggtgctggcggcccagaacccgggactgaatccagaactgatccgggcggctttttgcgagacttacccagatctccagccggatttcgtcaccttccaccgccgcgcggtgctggacggggagggaaaggaattccgctgaccggcgtgtaaaaccaggtttgagaaaatttgcaaaaaaggcttgtcaaccgaaggggaaacaggtataatgacaaagacgccttttggcagcactaccgaatttttggagggaatctaccttggatagtgggatgtacagcattgttttgttagtcctgatgtttgcgctgctctacttctttatgatccgcccggagaacaagcggaagaagcaggcgcaggccatgcgggactctctgaccgttggggacgagatcaccaccatcggcggcatcatcggcaccatctgtgctgtgaaggagaacaccatcgttatcgagaccggtgccgaccgtgtgcggatcgaattcaccaagtgggccgtgtccaccaagggggcccagacttccgagaccacgaagtaaaggactccgtgccgtgcttccgggctgctgtgccctggggcagaaatgacaggcatgacaagcacccttcccgcataagattccatacctggaacttgcggggagggtgttttttgtgaaaacgaaaggaaagcgggaagaggcggagagcccctggctggggaccatgtgcgggatgctgaaggggggcgcactggcgtttctgacggcggtggccatcctgttcctgtgtgcgctggcggtgtccaaccgctggctggggcaggggatgatggacagcgcagtgatggcggcctgtgccctgggggctctcgccggcggcctgctggccgtccgtcagggccggggcaggagcctgctgatgggcttcggggcaggtctgatcctgttcctgctgctgctcactgccggtttcctgttctatgagtcagcggatctgcgcaacggcgggctgggactgctgctctcctgtggctgcggcggcgccctggcgggcgtactggggggaaaaccaaagaaaaaacgcagaagatgattgaaatcccggcctgtgtatggtataatcctaccatacatattggcggggctatgctccgccctatgacagcatattagggaggaagattccgatgaagcacatccagactctgaacggagccactttgaagaacagcgcagcccacggcggctgcggcgagtgccagacctcttgccagtccgcctgcaagacttcctgcacggtcgccaatcagaagtgcgagaacgacaacaagtaaggacaacatcctgaccggaaaggggcgggcgtcagcctgcccttttttcgcggctggaatcggccgccaatctttgcaaattcggaggaatatcattatggtacacacattttccgcgctgggccggaacttggcggtggatgtgaacagcggggcggtccatgtgctggacaagctgtgctgtgacctgctttctctggtggagggccccatgggagatgcctgtccccaggatctgaaggaccgcctctctcagtacgacgccagggaactggacgaggcctggacggagctgctggagctccagcgggcggggctgctcttctcagatgacgactacatcgacccggctgccgccatggccctgcccaaggcggcggtggtgaaggcactgtgtctgcatgtctcccacgactgcaacctgcgctgccgctactgctttgcctctactggcgacttcggtaccggacaccgcatgaccatggactttgataccgccaagcgggccatcgactgggtggtggagaagtcgggcaagcggcggaacattgaggtggactttttcggcggggaaccgctgatggcgctggacaccgtcaagcggacggtagagtacgcccgctccctggaggaaaagcacgacaagtgtttccgctttacgatcacaaccaacggtgtcctgctggaccaggacaccatcgactacatcaaccgggagatgtctaacgtggtgctctccctggacggccggcgggaggtcaacgaccacatgcgccccactgtcaacgggaaggggagctatgacgtgatcgtccccaagttccagcagctggtctctcagcgggggaccaaggactactatgtgcggggcaccttcacccgggagaacctggactttgccgacgacgtggagcacctggcttccctgggcttccgccatgtttcggtggaaccggccagcggaccgctggacgaccccttcgccatcaaggagggagacctgcccgcagtggaggcagaatacgagaagctggcccggcagctgcaggggaggaaggacgtgaacttcttccacttcaatgtggatctggctcaggggccctgcgtcatcaagcggctgcggggctgcggggcgggctgtgagtatgtggccatcactcctgatggggacatctatccctgtcaccagtttgtgggcagggaggagtaccggatgggcaatgtccgctccggggacttcgatatggacatctccgggaagttcgcggagctgaacatctacacccgggaggactgccggaactgttgggcccgcttctattgcagcggcggctgctccgcctccaacctgcttgtcaacggcgacataaaaaagcccaatgcggtagcctgcgaaatggagcgtaagcggctggagtgcgccatcgccctgcgtgccattgcggccgggatgggagagacggagaatacagaatgtaataatacggactgtagtctgcgcggctcctgcgcggaatagcagaaaacacaacatctgcggtgcctgacggtacaaaatcactatatttagaaagaaggcgggccagcagacactggcccgccttctttggtcaacaaagtttacataatcatgttgacataaagtattgacggaaatgacgaattttcacaaatccttcaaaaccccttgcggaaacgggcgccgagcggtatattaaggataaattcagattcggtagggggatccaagggttccccgcttctatttttttatcccgcctcataggctgacactgaggtgagcgccatggggagacagggaaagatcatgctggatgtgccgtctgggacgttggccgcgatggcggtgctgggtatggcgttcctgctggggggcggcgcgggctgcctgctgggcggcatggtgaatggtgcgggcggcagcgccctgtccgactatctccagacctatctgacgctggcccaggacgggactgagggagccccgggcttttgggcggtgctgtgggagcagatgcgttttcccctggcggccctgctgatgggattcacggcgttgggggtgatcggactgccagtgctgtttgccgtgcggggctttttattttctttttccgtggcctgcttctgccgcttgttcggcggggcggggctgatcccggcgctgttcttgttcgggctgccggcgctgctgtgggcgccagccctcttcgtgctgggggcccaggggatgctgggggcctacggccttctgcggcgggtgacgggggacagccgctatcccctcagctatgacaccgcctatggggtccgctgcgcgctgtgcggcggggcagtcatgctgtgtgtgatcttggagctgagcatcgttccggtgctggtgggggcttcggcccgctttgtgctgtgacttgcgggagggcccgcaatctggaatcagggagttttgtgtgtgtcgaatctgttggaggactatgagagctatctgacaactgaaaagaaggcctcggccaacacggtgagctcctatctgcgggacgtgcatcagtttgcccaggagatggaggaacgggacgtcccgctcgacgaggtgctgccccgggacgtggaggactatatccggggcctgacccggcggggcaaatccgctgccacggtgacccggtccgtggcatccatcaagtccttctacaactgcctgctgtcaaggggactggtggagagcaacccagcccgaaacgtgactgcggcgaaggtggagcgcaagctgccccagatcctcaccagccgggaggtggagctctttctggagcagccagactgcagcgacctgaaggggtaccgggaccgggccatgctggagctgctctacgccacgggtatccgggtgtcggagctgatcgagctggacgtggacgacctgaacctctacgccggggtgcttcactgtgccagcaaagggaaggagcgggtcatccccctttaccccgccgccatccgggcgctggaggagtatctgcgcaacgtccgcccgcagctcatcaacgagccggacgagacggcgctgttcgtcaacatgagcggggaccggatgagccgccagggcttctggaaactgatcaaatactaccaggagaaggccggcatccagaaagacatcacgccccacaccctgcgccactccttcgccgcccacctgctggagaacggggcggacctgcgctccatccaggagatgatggggcacgcggacatctcctccactcagatctactcccggatgctgaaccacaagctgaaggacgtctatcagaaggcccaccccagagcatgagccaggccggatgcagttcgtcctggtttttgcttgacagggcggctccgctgtgctacactgcatgggaatctagaagaaatggaggcgggaaaatgcacaatgccgcttgctgaaccgcatgatggaagagagaggggcctgaaaagccccggttctgtcatgcctgagcaagagggtgttgtcttcccgctccggctgttcgtatggagctgccccaggggggcggctgtggatcgtctgccaaagccgtgagaaggtgcgccttcttgcggcttttttcatatgccccgccggcggcggggcggaaagggaggcagaacagtgtctttgatccgaatcgaacatttgtattttacctatgacggcggcagcgagccggtctttgaggacctggacctacagctggacacagactggaagctggggctggtgggccgaaatggcagggggaagaccaccctgctgcgccttctggagggcgggctggagcaccgggggcagatccgcacgggcctggcctgccgccggttcccctgcgccgtccgggagacggaggtcccggtgtcccaggtgctgcgggatatctcaccggaggcggaggagtggcagctggtccgggagctgtccctgctggggctggatgaggaggtgctggagcgcaccttctccaccctgagcggaggggagcagacccgggtgctcctgtccgccctgtttctggacgaggggagctggcccatgctggacgagcccaccgaccacctggacgaggaggggcgggagctgcttgcccaatatctcagccacagccgccggggcttcctgcttgtctcccacgaccgggcgtttctggaccggtgcgtggaccatgtgctggccctgaaccggacggggccggagctggtgaagggaaatttctccgtgtggtaccaggagaagcaggaccgggaccggcgggagcaggcccagaaccagcagctgaagggggagatccgtcgactggagcaggcggcccgccggacctctgcctggtccgaccaggtggaaaagaccaaatacgccagcaaaaattccggactgcgccccgaccggggctatgtgggccacaagtcggccaagatgatgaagagggccaagagcctggagagccggcaggagtctgccatccgggagaaggcggctctgctccacgacgtggagcgggccgagcccctgaagctggccccccgggcgttccacagtgcccgcctgctggagctggaccgcgtctccatcgactacggagacgggcctgtgtgcggcgaggtcagcttctccctgagccagggggagcggctgtgcctggaggggaggaatgggagcggcaagaccagcctgctccggctgatcctgggggaggaagtgccccacacggggaccgtgcggcgggcctctggcctggagatctcctatgtctcccaagaggtggaccatctgcagggagcccttcgggacttcccggcggaggaggggatagacgccacccagtttatgaccatcctgcgcaaactggacttccccagggcggcctttgagggagaaatgggtgcgtacagcgcgggccagaagaagaaggtcctgctggcggccagcctgtgccgcagcgcccacctgtatgtctgggatgagccgctgaattttgtggacctgttctcccgtatccagatggaggagctgctgctggagtaccggcccaccctgctgttcgtggagcacgacgaggcgttccgggagcgggtggccacccggcgggtgtccctgcctgagcgcgggctggaaaaaacagacaaagatatgagataagatttgcagtttttccatcccctgcacgtatagaggcaggagaagacttggcagccacgggagaggggggagtcagggcaaaaggcaggaatgagtgtggaaagactgttgcctcagatgctgatgtccacagccgccatcctggttgggatcctgctggtcctcatggggctgctgcgcatagggaggtcaatcaagttccaccatcaccatcggattttcctccagcgttgtcgtgaccatcgacagaggccagctggaggaattcttccgccgatccggctgggcccggtggccgatatctgcataacagaggggctccccggcagtgccggggagccctgacgatgtgggaaagtgggcggtccagagcgcagttagcgggaggcccgggggcaggcggtgccggtgcctgactccgcagaggctggagcggccgcctggacatagacggcgtcgtccctggggtccagcacggccagtgcagacagggcctcatcgtcggccctggtgagggacaggaccagacggttgttctcctcgtccagggcgcaggaggacagcaccgccttcactgagggctgggcacagatctgctcctggagcttggtgagggaggcgagggagtagcgggccctggcaaaggacaccccgcccccggcccagtcccggacctgactgcgcagggcctgtgtgtcgcagccctggaccagcaggaccaccacatctcccgcgctgtccagatagccgccgccgtaccagtccgggtaggtgccgttgccgtattcccgttggatctcccgagtcaggcgctccaggagcagggcgccctctcctgcgtcggcatcggaagaggtctctccctccgcactgggcagctgctgggcagggaagccgccgtcctgggcggaggcgggaagccggctgaggtcgtacggctccccctcctctgcggggagggtgtccggtccaagtccgctctcgctgatgatgaggccggggcggggggctgcctcctgggtactggcgtcctgttcctgccccgccgcttcctccaccgtcacatagctgtggaggggcggaaagaggagggcgtgtcccagcggcagggcggccgccagaaggaggcaggcggccagcacccagtaccggcaccggtggacggggcggcggacaggccgggagagcccctcctccagcgcggcccgggccgccgggctggggatgagctgttccttcatctgagaaaagatggggtcattcatgaaaatagtctcctttcagcagctcccgcaggtgctcccgcccccgggacaggcgcatccgcaccgcgcctgggcggagggagaggagccgcgcgatctcctgggtggacagttcttcaaagtagaacaggtagagggggaccctcagcccgtctggcagagaggagagggcggaccagagcccggtctgttccggggtctggaactgcaccggcgcatccgcacgctccgagagggggaccacacgcctccgccagggggaggcggtcacccggcggctgaaattgagagtagtgcgcaggagccaggccctgcggtgctcctcctcccggaaatgtttgccgcactggaaataggccagaaatacctcctgaaacacgtcgtccgcatccgcccggctgccggtccgagccagtgcgaagccgtacaccattttttcgtaccgctccaggatggaggcgaatccctcctccgggctcagcggttgctctgccatatcacgacctcccttcgcataatactccattttgcagggggaaatgtcacggtggaagcagacttttttctccagagcccccatcccattttccgttgtaccatacacccgccgggaaagcaagggagtgcctcttcccatgcctcccgacagccgcccagtgtgccgcggtatcgaaagagagagggaaagtgaaaacagtctttccatttggagaaaaacatgatacacttacttcgtatgtatggaagcgggaggggcccatgatcgttttaggcatcgacccgggcgtggccaccatcggattcggggtggtgcgtgcggagcgtcagaaaaacacgctggtccaatacggcgtcatcaccaccccgccgggcatccccctgtccagccgcctgctccagatctctgacgacatggaagagctcattcgcaccttccacccggacgagatggcggtggaggagctgttcttcaccaaaaacatcaccaccggcatcgcggtggcccacggccggggggtcatcctcctctcggcggagcggctgggggtccccgtctttgagtacacccccatgcaggtgaagcaggctgtggcgggctacggcggggcggacaagcggcaggtcatgctgatgacccagcgcctgctgaacatgaagcaggttccccggcccgacgacgccgccgatgccctggccctggccatctgccacggccgtgccgccaccagcctcctgaacaccgaacgggtctttgaccccatgaaatacgacacacgatgaaagaacagcggatcaggagataggaccagggggacttgactcccggaaaggatgggacccatgcctgtcatcgtaaagcagcccgccccagacctgccctacagcctccacgacgcctatattctggaggtgcggctggagggggataccctgcggctggtcacccagtacggctatgtggagacaacagagcccttcgaccaggtgcagggggatgtggagatcactggggtagactgggacagctcccacgcctatgtaatggagtaccgcggcgtcctctgcggaaaccgagggccctttaccggccggaaaatggcggtggaggattttttgaagacataccctcaggggacgctggacattatggacgagacctacgggtaccgccaggtgaagctggacggctttctcaacctgaccggccgctgcctggagtttcggctggagctctattatagcggagaattccgatacctactcaaggagccggcgcctggagcggctgtctgaactgtgtccggcggagctggataccgcatccatatctcataactcctatctgatctaatgtgaggtcctatcttatgttttattatctcagtggaaccgtgacccatatcgagccctatctggctgtcatcgactgcggcggagtgggctatgcctgccgcaccaccagctataccctgtccgccctgaagaagggggataagggaaaactctttacacatctcaacgtgcgggaggatgccatggagctctacggcttcgccacccaggaggagctgaacctgttccagcagctcatttctgtctccggcgtgggccccaaggccgccctgtccatcctgtcggccagcaccccggccaaccttgctctgtctatcattaccggggatgagaaggccctcacctgcgcccagggcatcggcaagaagatcgcccagcgggtcatcctggagctgaaagacaagctggccaagggccagaccatcaacggggcgggggagacctatggaggcaccggggtcaccgtcatcccggagaacaagctgtctgaggcctccgccgccttggcggtgctgggttactcccagggggagatcaacctggcgctcaaggggatcgacttggacgcccttaccctggaagaggtcattaagcaggcgctgaagaagatgatgaaggggtaaagttccgactggaggtgcagggaaatggccaagtttgaatgtgtgtttccaagcggctattcctttaacgatatcctgcagtatttccatacccatctcaccaaaaaccacggggaatgcacggggagcagcgactattcctctgaacgtgcccgggttgccgtccgggtgtatgagcgatacagtctgatgggggacaactatctaagcctgacgctcaccctggtcaatgacggcggggataccttcgcatccgctatctccgccgccgggcgtgggggcggtctggggatctccattcactggggtgaggacaaatttttggagattttttccgacggcgcaaacatgttccaggggatgagggtcctggagaaaggctgaagggtgccgggacgcggcggccaaatatgaaaaacacttccgcggcgattttagacaggttttgaccctgatcgaccgggcagtgatggacggcggctcctctgccgcgctggagaccgcagtggcatgagctgcggcgaggcccgccccgtgggcggccgggacaggaggggacgatgaagaagctggagcggaacataccgggggtctacgactttgatgaggtgctggactatctgcaccgggggatcatggacatgcggaccaatgtggtgtggaacctgatccaaatgcaggatacggtgaccctggcgggccagtgggacggccggcgggatggcgtccgctgcgccttccgggtgtatgagaaatatatttatactcattcaagaggttaccgccttaccctgaccatgatgctggcgggccgggacggcaggctgtttttgtccgttgtcccgggcgcgtcccaccagtatgctgatatagccggagtggatgagacgatggactggatcaggacactggcggaccagctcaccggctgagtccgccgaaggaggggacacgatggcaacgctggagcgtgagttttccgcccgctggggcgtggacgaggtcttccgttatttccgggacgggatcctggcggggagccagtctgttaccgacgggggagggagtgtctatgagacagagggggcgcgctttattgtccgggtgtttgagcggttcagcctgacagaccgggatctggtctcgctgagcctgctgctggccgacctgggggacggcaggattcggctcacagggatcaccgccggctgcggcaggctggagaagctatggacctatggcgaggaggcctttttgaagaagctgacgaagctggcagacgggttcgatgccgcccacccacaacagtaggggagagggcgccctctgctggcggccgctggcaccttgctagaggtcatcagcgccgagccgcctaagatctttttcgacggcttcggcatggagctcccggagggggcctatcgggaatatcccaaatgcgacctgctgtacgacctgccctgaccggtggggcgcgtgcggccgggatcggaccaatgaacaggaagtggacctatggccattgatttttccaacacagaatttgaagcggaggggctggaggagcccctggtgaccacctccctcacccgggaggacgagggagagtactccctgcggcccaagaccctgcgggagtacatcggccaggagaaggccaagggcaacctggaggtgttcattcaggcggccaagatgcgccatgagcccctggaccatgtgctgctccacggcccccctggactgggcaagactaccctcagcggcatcatcgccaatgagatgggggtgaacgtgcgcatcacctccggcccagccatcgagaaggcgggggacctggccgccctgcttaccaacctgaacgagaacgacatcctgttcgtggacgagatccaccgcctgaaccgggcggtggaggaggtgctctaccctgccatggaggactacgccatcgacatcatcatcggcaaggggccctcagccaactccatccgcctggacctgcccaggttcaccctcatcggggccactacccgggccggacagctgtccgcccccctgcgggaccgattcggtgtgacgctgcggctggagctttacagtccggaggagctggccctgatcgtcacccgttccgccggcatcctggaggtgcccatcgagccggagggagccatggagatcgcacgccgctcccgggggacgccccgcatcgccaaccggatgctccgccgggtgcgggacttcgcccaggtgcgggctgggggcgtcatcacccggaacgtggcagaccaggcccttaccgccctggagatcgaccatctggggctggacgccatcgatcaccggatgcttcgcagcattatggaaaactaccggggcggcccggtggggctggagaccctggccgccaccatcaacgaggaggcggtcaccctggaggacgtgtatgagccctacctgatgcagctgggcttcctcaccaggaccccccggggccgctgcgtcactcccaaggcctatcagcacctggggctgccgatgcccgggggcgcgggcggcggcggactggaccagctgagcttctaaatcggaaaggggagaggaccatgggcttttggcttttctgcaccgcctcgtccctgctgatcccgctggtgatgctgctttttggccggcgttttttgacaaggccgcccaagagcatcaactccctctacggttaccgcaccgcacgatctatgaaaaatcagcagacctgggactttgcccaccgggtgtgcgggaagctctggtctcgggcgggggctgtcatgcttcctctgagcctgctggctatgctgcctgccctggggcggggcacagaggagaccgggatgtggtgtattccggtgacaggggtgcagctggcagtgcttgtgggcagcatgttccctgtggagcgggcattgaaggaaaactttgatcaattcggaagaaagaggtaatcatatatgggtaaactattcggaactgacggcatccggggcgtggtcaacgccggtctggacgcggacctggcctataaggtgggcctggcggcggcggaggtgctggccaagggcaagcagccgggggagaagcccctggtcaccatcggcaaggatacccgcatctccggcgacctgctgaagggctccctcatcgcggggctgtgcaccgcgggggccgacgtgctggacctgggcaccctgcccacccccggcgtggcctgggtgacggtagacgagggggcggatgcgggcatcgtcatctccgccagtcacaaccccttcgagcacaatggcatcaagatcttcaacggccagggcttcaagctgtccgacgagctggaggagaagatcgaggagatcgtcctcttcggccacaacgacgtgccccgaaagacccacggggagatcggcaaagtgagttatgtggcccccaaagcgtcagaggactacatcgaccacctggagtccaccatcgactccaccctgggcggcctgcgcatcctggtggactgtgccaatggtgccgcatccgccaccgccgcccgcctgttcgaccgcttctccaagctgcgcaccgacgtcatcaacgccgacccggacggggtcaacatcaacgaaaagtgcggttccacccacatggacgccttggccgccatggtaagggctgggggctatgacatcggtatcgcctttgacggcgacgcagaccgctgcctggcagtggatgagcggggggagctgatcgacggcgaccagatcatggcggcatgcggtctggacatgaagcggaaggggaagctgccaggaaacgcggtggtggccaccgtcatgtccaatctggggctgcatctgttcgccaaagagcacgggatggacctggagtgcacctccgtgggcgaccgcaacgtgctggagcgtatgctggagaagggctatgccattggaggagagcagtcgggacacatgatcttcctagagcacgccaccaccggagacgggcagctcaccgccctccaggtgctcgctctgctgaaggagagcgggaaacgggcctctgaggtgttcgggatctgccagcggtatccccaggtgctcatcaacatcccggtcgccgacaacgacaggaaaaaggccgttatggccagccaggccctggccgatgccgtggctgcggaggaggagaagctggccggcgagggccgggtgctggtgcgcccctcgggcactgaggccctgatgcgggtcatggtggaggccagggatcaggatacggcccaggcggcggcgcagcggctggcggaccagatcgccgccctgtgacagaaaactggaaggtgtggaagttcgtgacaaggggcagttttcctgctctgtgagactttcacaaatcgattcaaaatttttcttgacaaatccgtcggttttgtttattatgtataggagccatagtatatggatttggtgcagtcccaaacacagtcttactcggatgaatcgctctgccgtctggccgcctccggcgacccgctggcagagaccgagctggtcggccgctatacacgtctggtgcgagtgtgtgcccgcccgctttttctggcaggcggcgacagcgaggatctgatccaggaggggatgctgggactgctggccgccatccgcggcttccagagcggcaaggagacctccttccgcacctatgcggagatttgtgtccgcagcaggctctatgccgccgtccgggcggcgcagcgggataaacactttcccctgaaccatagcgtctcattcgaaacccctctttttgacggaaccagcgcacacctgttctccagcgaagagagcccggaagatgttgtcatcggcagggaagaactgagagagcgcctagacgctctgaagggacaattatccggtttcgaggcagaaatcctatcctactatctgggcggtctctcctgcgccgagatcgccagccaggtcgggcgctccactaagtcagtggacaacgccgttcagcggatcaggcgaaaggtggcgcggcaactttcttccggcgatctcagcaagagctgatcgcaaatattacaccacccatgaaaaatggggaacgagtcaaagagagggaaaaccatgtacgaagacaagatcctggtatgcaaagagtgcggcaatgagttcacctttaccgccggtgagcaggagttctacgcggagcgcggcttccagaacgagccccagcgctgcaaggcctgccgtgacgcccgcaagaacgcggcccgtggcccccgtgagtacttcactgccacctgcgctgcctgcggcggcgaggctcgggtcccctttgagcccaagtctgaccgtcctgtttactgcagcgagtgcttcgccaagatgcgcgagcagcagggctgatttcatccaggaaaaaagggtgcccactgggcaccctttttctcttttccaccctttctcagatgttgaggagcgggaaggaggtcccggggctgagaagatagggggggccgtcctctttctcagggaaagagaccacatctggagaaagcagaaaacataaaattctccattgcaaaaatcctgtcgataggatatactattcttattccaaagaaaacggaggaattctgctatgaccatcaccaaggacaccatcatcggtgatatcctcaacattgcgcctcagaccgcccccctcttcatggggatcggcatgcactgcctgggctgccctgcctcccgcggggagaccgtggagcaggcctgcatggtccacggggtggacgtggatgatctgctccagcaggtcaacgccatgatcgccgccgaaaactgagctgctgaaaaagcggggcggagcaatccgccccgcttttttattcattaaacaacaggggaggaaacagcgttgaaatatacggttttgatggggagcccccggaagaacggcaataccgccgctctgctgcgggcatttatggaggagaaccgggacatggggatcgagcaggatatgatctggctctatgaccggaccattttgccctgcctgtcctgcaagcagtgccagagcacgccctgggggacctttggctgcccccaggaggacgacatgcaggccatctttgattccgtccagaccagtgaagtacttatccttgcaagccctatctattcctggtactgcactccgcctatgaaggcggtgatggaccggctgatctatgcacccaacaagtattatgggccggagggccgtcagcccgccctttggaagctgaagcaggtggctgctatcgccagctgcggctatcaccccgaccggggcgcggacctgtgggacgaggggctgaagcgctggtgcaagcacggggagatggactatctcggcatgctgtgccgccgggacttcgggccccaggagccctttatgaatgaagagcgggatgaggcagcccgggactttgcccacgccctttacctgacggtcagcctgtccctgtgactatggagaagcgggcggagctgagcccccggctccagggggtggcggagatgatcccggagggggcccggctggctgatgtggggacggatcacgcctatcttccggcatggctgctccagaacggacgcatccccagcgccatcgcctcagatgtgcgggaggggcccctctccagggcccgggctaccgcccgggcctgcggctgctttgagcggatgtccttccgcctgtgcgacggcctctctgggatcgctccggaggaggtggacgctctggtcatcgccgggatgggtggggagactatcgctaatatcttggaagcggcgccatgggtaaaggaaaaagactttccaattattctccagcccatgagcactcaggcggagctgcggggctggctgtggcgcaatggatttctatgcctacgggagaaaacagttttcgaaggggaaaccctttacagcataattttggcgagacagggaggcgcggtccccatgacgcccgccgaggagtgggcggggcgccagtacccggggatggaggacccgctccggggcctgctgctggaccacttgctggggcgggtgaggcgcgccctggatgggatggcccgctcccgggcgccggcggaggcgcgccgcagggagctggagcaggtcctggagggcctgatggagatgcggaaggagtgggatgcatggcagcagcgataatagacgtctaccgggctctggaccagtgggcccccttcgacacccagatggactttgacaatgcgggcttcctggtgggccggggagagcgggaggtccggagggtcctggtgtctctggacatcacggaggcggtggcggcggaggccggccgctggggggcggagctgatcgtctcccaccacccggtgatttttcatccggtgaaggccctcaccgaccagaccagcaccgggcggaccctgctcctgctggcggaacagggtatcggggcggtgtgtgcccacaccaatctggacgctgcccaggggggcgtcaatgactgtctggcccgggccctggagctggacggtgtggaactgctctgccgggacgggactgacggacaggggcggccctacggcatcggccgggttgggacggcccctcaggccggctgttccgccgctgaatttgccgcctttatcaaggaaaagctctccgcctgcagcgtccgtttcgtggagacgggccggccggtgcgccgggtggcggtggggggcggcgcctgcgcctccatgctctccgacgccctggcggcggggtgtgacactttcgtcactgccgacgtgaagtacgaccaatacctggaagcaaaggccctgggcatcaatctgatggacgcgggccattttgccacagaggatgtagtgtgcccagcgctggtgcagttcctctcccggcacttcccgaaggtggaggtccggcggacggagacccaccgggaggcttatgattcggtgtgagaaaggcgaaaaacagggaaattctacttgcattttgaaaaatgctgtggtataatcctttggtctgataacgggcggtcctctgcggcgccccagcgacagcggggcagacggccggcaagaacgcctatataaacaggaggaatcattatggatctcatgcaggcttttactcagaagcacctgaaggctgagccccccgtcgtagaggtgggcgacaccgtgcgggtgcacatcaaggtcaaggaaggcaaccgcgagcgtatccaggtctttgagggcaccgtcatcgccaagaagcacggcggtctggaggagaccttcaccgtccgccgcgtgtcctacggcgtcggtgtggagaaggtgttccccgtccacgctccctccattgagaagatcgagaccgtccgccacggtaaggtccgccgcgccaagctgtactacctgcgcgaccgcgtgggcaagtccgccaagatcaaggaagccctgtaatccaacataaaaagggagcggtactggtaccgctccctttttataccatggcggcggggagagcggagcacgccctccgccgtagggaaggagaagacgagagttgaatattcagtggtatccgggacatatgaccaagaccagacggcagatcgaggcggacctgaagcatgtggacatcgtggcggagatcatcgacgcccgcatccccatctccagccggaacccggacatcgatgccatctgcgccgataagccccggctgatcgtgctgaaccgggcagatcaggccgacccagcccagaaccgggcctggggcgagtatttccggaaaaagggatatgcggtgctggagactgatgccaagaccggccggggtgtaaaccagttctcctctgtgacccaggaagtgctgaaggagcagatctcaaaatggcgggagaagggccaggtaggccgtccggtgcgggccatggtggtgggagtccccaacgtgggaaagtccacctttatcaataaggtggcccggaagaagtcggctaaggcgggggaccgccccggcgttacccggggcaagcagtgggtcaacgtggacagtgccctggatctgctggacacaccgggcatcctgtggccgaaatttgaggacccgcacactggcatggtacttgcctttacaggcgctgtcaaagacgaaatcatggatgtggagaccctgggctgtcatctaatggcctatcttggtgagcactatccccaggtcctgacccagagttacaagctgccggaagttcctgcccgccaggaggaggaaaacgacatcgcctacggctaccggctgctggaggccggcgcggcaaagcgggggatgcgcatctccggcggcgagttggacacggagcggatggctcgggtcctgctggatgaatacagggccgggaagctgggacgctttacactagagacaccagaaggaacgtctatatgagcagcctggagaaaaggaaggaaggcatgggaccgggagagtatgaacagaaagcagtggaggccggctttgtccgggtctgcggctgtgacgaggcgggggccggacctctggccggaccggtgtacgccgcggcggtgatcctggcccagggcgcggacatccccggcctgaatgactccaagaagctgacagaaaaaaaacgggaggcgctctttccactcatccaacagagtgcgctggcctggtcggtagcccgggtggaggctgaggagatcgaccggaccgatatcctcagcgcgcggatcagggccatgcagctggccatagaagggctctccctccgcccggattttgccctgatcgacggaaaccgggaccacgggcgctctgccgccattaccgttccccactggtgcgtggtgaaaggggacagcatctcgccctccatcgccgccgcctccattctggccaaggtgagccgggaccgcttcatgctggagatggcggagcgctatccacaatacgggttcgagcggcacaaggggtacgggacccgactgcactatgagatgctgcgccggtacggccccagccccatccaccgccgcacctttttaaaagacctgtgagcgggggagagagcaggctgctgggccggtggggagaggctctggcggcggaggagctgcgccggcgcgggtgccgcctggtggaggccggctggcgctgccggtttggcgaggtggacctgatcgcggaggaggggcctttcctctgctttgtggaggtcaagctgcggaaggacggacgggtggcccaggcgcgggagttcgtggaccggaggaagcaggagaagctgcggaccacggcccagctctatctggcggagcatcccacgcagctccagcccaggttcgacgtggtggagatctacgctccccaggggctggcgacccgggccccggagatctatgtcatccctgacgctttttgacgtccccctgccccgatccggaaaatgggcggggcccggggggagaaaatcggggagaaggggagactgcccctcttttttgcgacaaacgcttgaccggagagaaaagaactggcataataaagcattggattgaatagcggggcgaggcggccctgtggtcttgatgatcgagatttgactggataaaggactgagagaaatgcagtacatcagcacacgagataagaacaccacatatctggcatctcaggccatcgcccaagggctggccccggacggcggcctgatgaccccggcgtatctgcccaagctcccgggcaagtccctgtctgacctgaaggagatgtcctatcagcagcgggcggtctatatcatgaagctgtttctggacgagttctccgtcaaggagctgacggagttcgctgcggcggcctacgggccggaaaaattcgacactcccgccgtggccccggtccgcgccctggatgacggaaccttctgcttggagctgtggcacggccccacctgtgctttcaaggacatggcccttcagatgctgccccatctgctcacagcctctctggtgaagacggaggaggagaagacggtgtgcatcctggtggctacctccggggacactgggaagggggcgctggagggcttccgggatgtggaccgcacccgcatcctggtcttctaccccaaggacggtgtctccgccatccaggagcttcagatggtcacccaggaggggaagaatgtgggcgtctgctcggtcttcggcaactttgacgatgcccagaccggagtcaagaagctcttttccgacgaggcgctccgccaggagctggcccgccgggggtacttcctctcctccgccaactccatcaactggggccgggtgctgccccagatcgtttattatatctccgcctactgcgacctgctgcgggacgagaagatccagccagaccaggcggtgaacgtctgcgtccccacaggaaacttcggcaacatcctggccgcctactacgccagggagatgggggtcccaatcgacaggctgatctgcgcctccaacagcaacaatgtgctcactgacttcatccgcaccggccgctatgaccgcaaccgcgccttccacaacaccatctctccctccatggacatcctgatctccagcaacctggagcggctcctgctggcgctgacccaggatgacgagcaggtgaaggactacatggcccagctgtccgccaccgggacctatcaggtcagcgaccgggtgagggagaagctgcagaagcggttcgctggctatttctgcgacgacgcggagaccaaggccgtgatcggccgcatctatcagaagtacgactacctcatcgacccccacaccgccgtggccttcgacgccctggagcagtaccggagcgagacgggggaccagaccccctgcatcgtggtctccaccgccagtcccttcaagttctgcgacagcgtcctcagcgccctgggcgaggaggagaagcagaacgggctggagctgctggacgagctgagcgaaaagaccgggatgcccgcccccaagccgctgtcatccctccgggacaaggagatccgcttcacacagaccgtggaaaaggaccacatggtggacgcggtgctggggatgctggagtaagcgatggccctgtacgccattggagatacccacctgtccctcagctccgacaagcccatggatgtcttcggcgggggatggacgggatatgtggagaagctgcgggagggactgtccgtgctggagcccggggacaccgtggtgctctgcggggatctgtcctggggcatgagcctggaggaggcgaggcgggactttgctttcctcagttccttcccagggcggaagctgcttttgaaggggaaccatgactactggtggaccaccgcagccaaaatggaccgctttttccaggaaaatgggttttcttcctttcaactgctccacaacaacagccatctctatggagacatcgccctgtgcggcacccggggctggttctacgaggaggaacgaggcgggcacagtgccaagatcttcaaccgggagctgatccggctggaggcatcactgaaggcggcgggggagcgggagaaatactgcttcctgcactatccgcccctgtatcaggggtaccggtgccaggagatcctggatctgctccatcggtacggcgtgacccgctgcttttacgggcacctccacggggggagccaccgcctggcagcggtgggagagcaggacggcatccagttccggctggtctccgcggattatctgcggtttcaaccagaaaaaatctgcgattgagcggaaaaatcaaaaatatctctggtcaaacagagccacatctgttagaatatccaggcgaaagtaaaaaggcgggctgttcccaacaggggaccaggagcctacaggaggaaaaggaaacatgaaggtcaccaacgtggaaaagaaagaaaagagcaccgtggagctgaccatccaggtggaagctcaggagtttgaagacgccgttcagaaggcttatctgaagaaccgcgcccatatcagtgtgcccggcttccggaagggcaaggccccccgcaagatcattgaggggatgtacggctccggcgtgttttatgaggatgccatcaatatcgtctaccccggcgcctatgaggaagctgtgaaggagcagggcctggacgatgtaggttacccccagacagaggtagtggaggtcggcaaggagggctttactttcaaggccctggtctccgtccgtcccgaggtgaagctgggccagtacaagggcctcaccgcccccaaggctgagccggccgtcactgacgaggacattgagaacgagctcaagccctacatcacccgcgccacccgcctggtcagcgtggaccgggaagcccagaacggggacaccgccgtcatcgactttgagggctttgacaacggcgtggccttcgaaggcggtaagggagaaaattacagcctggagctgggctctggttcctttgtccccggcttcgaggagcagatcgtgggattgaaagccggcgacgagaaggagctgaacatcaccttccccgaggactatgtgcctgacctggccggaaaggccgtgatcttcaaggtgaaggtcaaggaggtcaaggagcaccaggcccccgtggtggacgacgagtttgccaaggacgtgtccgagttcgagacgctggaggagttcaagaagagcctgggcgacaagctgctggacagcaaaaccaagtccgcccagcaggagtatgagaacgctgttatcgagcagctggtgggcaacatggaggctgacatccccgatgccatggtggaggttcagctggacaagctgatggaggacttctccatgcgcctgtccaaccagggcatgaagatggaggactacctggcgatgatgggcgccacccccgagtccatgcgcgcctctgcccgccccaccgctcagcgtcaggtggaggtggacctggctctcaccgctgtggccgacgccgagagcatcaccatctccgacgaggagctggaggaagagctgaagaagatcgccggggagtacaagctggagctggatgaggtgaagagagccatccccgtggaggatatgaagcgggatctgcgcctgagaaaggcctctgagctggtgatggccgaggccaaggtgggggaggcccccaagaaggaagaggccgaggagaagcccaagaagactacccgcaagaagaaggctgagagcgccgagggcgaggaggccgccgccgaggagaagcccaagaagaccacccgcaagaagaaggccgaggaggctgaggagcccaaggcggagtaatttccaaggtttttgtgtccggaggtatgcgctccgggcgggcgggcatactattggtatcactgcccaagtcaaaggagatcattctatgagtttagttccttatgtagtcgagcagaccaaccggggggagcgttcctacgacatcttctcccgactgctcaatgaccggatcatcatgctctccgaggaggtcaacgacaccaccgcctctctggtggtggcccagctgctgtatctggaggcccaggacccggacaaggagatccagttctacatcaacagccccggcggatcggtgacagccggcatggccatctatgacaccatgcagtatatcaagtgcgacgtgtccaccatctgcatcggactggccgcctccatgggggcgttcctgctgtcctccgggaccaagggcaagcggctggccctgcccaacgccgagatcatgatccaccagccttctgccgggacccaggggcagatcaccgacatggcgatccacctgaagcggctggaagtggtcaagaagcggatgaaccgcatcctgtcggagaacaccggcaaggccatcgaggtggtcaccgccgactgtgagcgggacaacttcatgaccgcccaggaggccgtggagtacggcctgatcgacaaggtcatcgaacaccgttaaaggaaacaggggagtgggaacaggcttctgttcccactccgattcctatctgaacgcacaacaatgaggtgcattatggcaagaaacgacgaaaaaaagtccatccgctgctccttctgcggcaagcatcaggaccaggtccggcggctgatcgccggcccgggcgcctatatctgcaacgagtgtgtccagctgtgcatgggcatcctcagcgacgatgtggacctgccagaggagggctacgctggagagatccctgacgagatccctacgccccgggagatccatcaggttctggaccagtatatcatcggccaggatcaggccaaggtggccctgtcagtggcggtgtacaaccactacaagcgcatctattttggaggcgcggaggatgtggagctccagaagagcaacatcctgctcatgggccccaccggctgcggcaagaccctgtttgcccagaccctggcccgaatcctgaaggtgcccttcgccattgccgacgccaccactctgaccgaggcgggctatgtgggcgacgacgtggagaacatcctgcttcgtctggtgcaggccgccgactacgacgtggagctggcggagcggggcatcatctatatcgacgagatggataagatcgcccggaagagcgagaacacctccattacccgggacgtttccggtgagggcgtgcagcaggccctgctgaagatcctggagggcacggtggccaatgttccgccccagggcggacggaagcacccccaccaggagttcatccaggtggacaccaagaacatcctgttcatctgcggcggcgccttcgacggcatcgacaagatcatcgagaaccgcctggataagcgcagcatgggcttcggcgcccagcttcagagcaagaaggagcgcaatgtgggcgaattcctgaaggagatccagccccaggacctgctgaaattcggcatcatcccagagctggtgggccgcctgcccgtcatcactaccctccagtcactggaccgggagcagatgattcagatcctcactgagcccaaaaacgccttggtgaagcagtatcagaagctgctggactatgacgaggtggtgctggagttcagccgggaggccctggaggcggtggccgaccgggcggtggcccggggcatcggagcccggggcctgcgggctgtgctggaggaggtcatgaccaagatcatgtacagcgtcccctctgaccccaccatcgtcaaggtgacaatcacggcttcctgcgtgacggacggggccgacccggagatcgtccgggacccggagcgccgccagcgcccccgtctgggcaaggcgtccctgcgggccgagcgcggcggtgcggtgggcaccaacgccggctgaatcccatttgaatgaccattgctgcaatgtcccgcggaagcctatcctgtgcgggcctcccgggacttgctttttattcccagagaggaagtgacgaacatggaccatgatcctgttgccagcatccagactctcccggccatcgcgctgcgggggctgactgtgtttcccaatgtactgatccacttcgacgtgggccgcgcggcctccatcaaggcgatggaggccgccatggctgccggagagccggtgttcctggtgggccagaaggacatgacggtggagcgccccgaacgggatgacctgtacacagtgggcaccctgtccaacgtgcggcagatcctccgcatgcccggggacaacgtgcgtgtgatggtggagggcatctcccgggcccgcctgagggacgtgacccagagggagccctatttgatggcggagatagaagccatcccggaggagaaggcgggcagggcctcggccaagaccgaggccctgatgcgcagcacctatgagatgttccaaaattacacggagctggcccccaagatctccccggacctgctcatcaatgtgctggccagcgacgacccaggctatatcgcggactatatcgcccagaacatcgccatgcgcaacagtgacaagcaggccatcctggaggagctccggccggtgcgccgcctggagcgtatgtaccgcctgctgtgccgggaggtggaggtgctctcccttgacatggagatccagagccgggcccgggagcagatgtcggagaaccagcgggactactatctccgggagcagatgaaggccatccaggccgagctgggtgagagcgagaacggagacagcgagacggcggactatcggaaaaagattgctgaggcccagctgccggagccggtgcgggagaagctggagaaggaactcaaccgcctgtccaagcagcccttcggctcctcagaggccaccgtgatccgcaactatctggatgtatgcctggagttgccctggggcaaaaagacccgggagcgggtcagcgtggaggctgcccgcaaggtgctggacaaggaccactatgggctggagaaggtgaaggagcgcatcctggagttcctggccgtcaagcagctggcccctgagctgaaggggcaggtgatctgcctggtgggcccgcccggtgtgggaaagacctccattgccatgtccatggcccgggccatgaatcgtaagctggcccgcatctctctgggcggcatcagcgacgaggcggagatccggggccaccgcaagacctatgtgggggccatgccgggccgtatcatcaacgccatcagccagtctgggagcagcaaccccctgctcctgctggacgagatcgacaagctgggctatgaccaccggggtgacccggcctcggccctgctggaggtgctggacggagagcagaacgcctccttccgggaccacttcctggaggtgcccttcgacctgtccgatgtgctgttcgtgaccaccgccaataccacggagaccatcccacggcccctgctggaccggatggaggtcatcgagctgaacagctataccgacgaggagaaacttcagatcgctaagcgccacctactgcccaaggagctcaagcgccacgggctggcccggacccagctgaaggtgtctgatggcgccatccgggagatggtggcctcttacacccgggagtcgggagtgcgggtgctggagcgcaagatggccaccctgtgccgaaaggccgccatgaagctggtggagggagcatgcaagtctgtttccattacagagcgggacctggaggaatatttgggagcgccccgcttccacccggagcgggaggcactcgcccagcgggtgggcgtagttaatggcctggcctggacctctgtgggcggtgagctgctggaggtggaggtcaacgtggtccccggcagcggcaaggtggagctcaccggcaacttgggcgacgtgatgaaggagtcggcccacgcagccctcagctttatccgcagccgggcctctcagctgggcattgacggagatttctacaagaacagggacatccatgtccacttccccgaaggggcggtcccaaaggacggcccttccgcgggcatcgccatcaccacggctatggtgtccgctttgacagatacaccggtaaagccgggactggccatgaccggcgaagtaacgctgagaggccgggtgctggccatcggcggactgcgggaaaaaactatggcggccctgcgcaacggcatcaagaccgtgatcgttccggcggagaacgagaaggacctggaggagatcgaccagacggtccgcgccgccctccattttatccttgtggagcaggtggaccaggtgctggccgcagcgctgtctctgtccggcaccgcctgtgagcgggacaccgagcaggggggacccttccctgcaggaaagggcaggacgtccatcggcctgaagcagtaagagggggagagaccatggccatcaacttccaacaggcggagttcatccgctccgccaccgcccccaaggattttcccagagacgggctcccccaggtggcttttgccggacgctccaatgtggggaagtcctcggttattaaccggctgctggggcgcaaaaactttgcccgggtgggggcggccccgggcaagaccgtccatatcaactactttctgatcgataagaccttttatctggtggatctgcccggctatggctacgccaaggtctccaaggcagagcgggaccggtggggccgcctgatggaggactacttcgcggaccgggagctgatgaccttcggcgccatgatcgtggacgcccgtcacaagcccaccgccgatgactgcaccatggcccagtggtaccgggacgccggctgcccttttgtggttgtggccaacaagctggataagctgaaaaaaagagagatcgagtccaatcttctgacaattcgagaggcgctggagttggatgagtctgtaaagttaattcccttttccgctgagaagggcgaaggaaaacaggagcttctggatttgatcctatcgaaattgtgaggaagcacggcccctctgcgcccatgcgggcacggaggggccgtgtgcgtgttcccgctgcggcggggagaaaagggagggaaacggagatgttggagcggagctatcagacgagacaggggaccatccgatactgggtgagcgcgcccggccctcgcgggaccgcgctggtctttctgccgggcctgacggcggatcaccggctgttccagatgcagttctccttttttgcatcccgccggcccctgctggtgtgggacacaccgggccacggggcctcccgcccatttgccctggatttctccctgatggaacaggcagagtggctccacgggatcttggttcgggagaggatgggagggcctgtattgatcggtcagtccatgggagggtatctggcgcagtgctttatggagcgattccccggacaggcccggggatttatctccattgattccgccccgcttcaacggaggtatgtcacggcggcagagctctgggcactgcggcgctgcgagctgctctaccgctgttacccctggagcatactgcggaaagccggagccagagggtgcgcggagacagcccaggggcagacgctgatgaaggagatgatggactgttacagcaaaagggaattcagcgccctggcggggcacgggtttcgggctctggcggaggcgatggcggctgatctgccgtacaaagtggactgtcccgcccttctgctgtgcggggaacgggaccgggcgggcctgacgagacggtataaccgccgctggtcggaagagaccggcatccccctggtgtggctccagagcgcggggcacaactccaacacggacgtgccggatcaggtcaactccatcatccagggcttcctcagggaacatggactttgaaacgtgtcggcggggacctggcccggtggggaggcagaggccgcccttctacggcagatcccagtcatcctcaaaaggaaaaatcttaccctccggctttctgtaaatttccgaagttctctctacgcagcattttttgaaaaagagctgcctgattcgccgtcttgtattttctttgagaatctggtatgataaacaagtatttatttgtccatgggtgccccatggacagggaagggaggccgccatggggtcgctgaatggttttctggagcatatggactggtttcaactgtttctgctgctgatcggtgcggtggcctgcctgttctgcatcaccttccacgagctggcccacgggttcgcggcctaccagctgggggaccccaccgccaaggtgaacggccgtctgacgctgaacccgatctctcatatcgactggatcggcctgatgctgctgctcactgtgcgggtgggctgggccaagccggtgccagtggatatgcggaacttccgccacccaaagcgggacatggctatcaccgccctggccggccctgcggccaacttccttctggccacggctgccctgggggtggcctccctgatctatcacttcgcgcctcaggggacggtggcggcctatgccatctatttcttcctgtatatggcggtgctcagtgtagggctggggatctttaacctggtccctatcccaccgctggacggttccaagatcctgttcgccctgctgcccgaccggatctactaccaatacctgcgctatgagcggttttttatcctggctgtggtgctgctggcctggatgggggtgttcagcgtgcccctgagcttctgcatggagggcatcgtccgcggcctgtgcgcggtgaccgccttcccgttccagctggcgcagtactatttcttctgagaggcattggggggaacgctttggacagtccgatctaccacctggaaggggtggtcaaggccaaaacagaggacatggaggactttgtcggccccctggacctgatccttcacctgctgagcaaaaacaagatggagatcaaggacattcagatctctctgattctggaccagtatctggcctggatggccgcccgcaaggagatggacctggaggtagccagcgagtttgtcaccatggcctcccagctggtctatatcaagacgaggatgctcctctccatccacgacgaggaggccctgagcgagatggagcagctcattgccagcctggaggagcaccagcgcaatgagaactatctgaagatcaaggagatcacccccctgctggaccggcggtacagctatgggagagacttcatcaccaaagtgccggagaccattcagccggacaggacctaccgctatgtccacgacagggaggacctgaaaaaggctattctgtctgtcctgtccagggcggaccaccagttgccgcccccagtggcggcttttcaaggcatcgtggggcgggagccataccccgtgtcggaaaaggcaggggagatcatccgccggctgctccggaccggggtcacccggttccgcgccctgttccagggcaaccgcagccgctccgaggtggtggccaccttcctggcggtactggagctgtgcaaggcccaccgcctgcggctggccgggacggaggaggactgtaccatcacctccacccagggggagcagggggaccatttagaggtcacagcggattcctttgaattttaacaggatgggagaagaggcatggaactgaaggagctggaggccgcgctggagggggtcctgttcgccgccggggagccggtgggggtggagcgcctgtgtctggggctggaggtggatcgggccaccatggacgcagtggcccagcggctgatggaccggtacagctatgagcggcggggtatccgcttggtgcggctggataccagctaccagctgtgctctgctccggaattcgctccctatatccgcaagactttggagaatcggaagccggcgcggctgtcccagcctgcgctggaggtgctggcggtgatcgcctactaccagccggtgacccgggcctatgtggaccagatccggggggtggacagcgcctatacggtgggactgctgctggagcgggagctcattgaggagtgcggtcggctggccgttcccgggcggcccatcctgtaccgcacaacgaaaaatttcctgcgctcctttgggctgtccagcctggaagagctgcctgagctgccggatgcctcccaggagagcggacagctgaccctggagctggaggcggcggtagcccgtttgagggcggaggagagtgggcagactgtccaagaggatggggcagctcacccggcccaggaggagacggaatgagggggtggatcgttctggcggcggtcctgctgctgttgttcctgctggggcagctgcggctgggcgcggtgggggagtatggtcccggaggcgccggagcctggttccgggcggggcctgtccgcatccgcctctacccaaggaggcgctcagggccttcgaaaaaggagaaggcgcccaagcccgggaaggagcaccctgcgggggaggcacgcggcggcggacttttggagctgatgaaggagctgctgcccctggccttggaggcggcgggctgtttccgccgcaggctgcgggtggatcagctggagctgaagctcaccatcggcgcggcggacccaggagacgcagctatccgatatggacaggccaacgccctgctgggaagcatctggcagcccctgacagaggcgttccatgtggaggagggccgggctcgggtagaggtggacttcaccgcggcggccccggtgctgacggggcaggtgtccctgtccctgaagctgtatcagctcctatggctggggctgcacttcggcctgcgggccctgagtacctatgtgaaccatcgaaatcggcataaacagcagagagaggcggtttgaatatggaaaaacagcatcccatcaatgaaatgatgagcactacaatggagaagatccgcagcatgatggacgccaacaccatcattggcgaccccatccagaccggggaggtcaccctgatcccggtctccaggctgtcctttggatttgccagcggcgggagcgactttgtgaccaaaaatcagaaacccggggctgagaacacctttggcgggggcagcggcgccagcgcgaagatggagccggtggccttcctcatcatcaagggggacagcgtcaagctgctcccggtcgatccacctcccgccaccacggtggaccgggtcatcgaggtggtgcctgaggtggtggaaaaggtcaccgatttcctggaaaagcagaaaaaagcagacgagcccccggagggaacggaccactttgtggtgtgaccgcactgatctgacagaatttgccggatccggcagggagagaaaaccggcggcccggaaaatactaaggtcactttgtttgatggaaggtgaccatattgaaacgactgctggcggcggcgctggccgctggatctctgctctgccaggtgcccactgcccaggcggtgggcacctccgcgtcctctgccatcctgatggaggcagagagcggccgggtgctctatgaacaaaacgcccacgaggaacggctcatcgccagtatcaccaagctgatgaccgccctggtggcgctggagtccggccacgacctggaggagaccgtcacagtgggggaggcctgcacccgggcagagggttcctccctctatctgcgcccaggggaggagatctcgctgaaggggctgctctacggggtgatgctgcgctccgggaacgacgcagcgctggcagtggcggagcactgcgggggcagcgtggaggagttcgttgggcggatgaatgaaaaggcggcccagttggggatggtgaacagccatttcgccaaccccaacgggttgaacgcggaggggcattactcctctgcctacgacatggccctgctggcccgggcctgcctggagaacgaggcactggcggagatcgccgccaccaagagcgccactgtggacggccgggtgctgactaaccacaacaagctgctgtggcagtacgagggctgcatcggcctgaaaacgggctatacagaaaaggcggggcggaccctggtgtccgcggcccggcggggcgggatgacgctgatcgcggtgaccctcaacgacccggatgactggcgggaccataccgccctgctggactacggattttccacctatgccgcggtgacgctgacagaggagggaaaggccgtggcacggcggcccgtgtccggcagcctggtcccctttgtggagatccaggcggcagagacggtgcggatcccggtgtgtgaagaggacaaaatcgactgggaactccagtgggaccaggaggcgctggaggctcctctccgggccggcggcagtgcgggccggatgatctgccgggtgaacggcgaggaggcggcctgcgtgcctctggtgttcgcccaggatgtggaacgtacgctccagcctcctggtggaatctggactcggcttatggagctttggaacagataaagaaagagaggggggagtcagcatggaggagcgcctgcaaaagctgctgtcagcctgcgggctggcctcccgccgaacggtggagcagtggatcgaggcggggcgggtcaccgtcaatgggacgaaggcacggctgggggacaaggcggacctggaccgggaccgcatcgaggtggatggccggccggtccggcccggcggagaccggctgtatctgatgctgaacaagcctcgagggtatgtgaccaccctgtctgacgagaaggggagaaagacggtggcggagctggtctccggatgcggacggagagtgtggccggtggggcggctggacttggactccgaggggctgctcctgctgaccgacgacggggaactgacccagaagctgctccaccccagtcatcaggtggaaaaagaatatctggtgtgggtcactggggacgtgagccgggggctgccggtgctgtccggccccatggatctggacggcgtgccgctgtccccggccaaggtgcggcgggggaggaccagcggaggagtgacccagctatccatcaccatctgtcaggggaaaaaccggcaggtccggcgcatgtgcggtcaggcgggtctgaaggtgctgcgcctgaaacgggtccgggagggagggctctgcctggaccggaccctggggcccggaaagtggcggagactggagcagagcgaggtggccgccctgctgcaaaagccctgattttttgccccgtaccggatagaacataaattttttgcaagataaagtttttatcctgcaaaaatggcttgcttttttccgggaaacaaggtatcataaggagctgaaacagctggtttcctcaaagagaaaagcaggagttgaccgagatgaatcgagacattttgactgtgatccaggaaaatatgagcaccttctccaaagggcagaagcggatcgccaactatatcctggaatcttatgacaaggcggcctttatgaccgccagccgcctgggcaagaccgtcagcgtcagcgagtccaccgtggtccgttttgcggcggagctgggctatgatggctatcccagcatgcagcgttccctgcaaaaaatgatccggaaccgcctgacctccgtccagcgcatcgaggtttccaatgaccggatcggagatcaggatctgctctccagcgtcctccagtcggacatcgaaaagatccgcctcaccctggaggaggtggatcgccagagctttgaccgcgcggtggacgccatcgtctccgcacggaagatctacatcatgggtgtgcggtcctccgcctccttggccaccttcctcagcttctatttcaatctgattttcgacaatgtgatctctgtggcggccaacaccgccagcgaggtctttgagaccatgctccgggtgggggcggaggacgtggtcatcggcgtgagctttccgcggtactccagccgcaccgtccaggccatgaacttcgcccgggaccggggcgccaccaccattgccatcacggacagcgaggcctcgcccctggcccccatctccaactacacactgaaggcccgcagcgatatggcctccttcgtggactccctggtggccccactcagcctggtcaacgccctgctggtggcggtgagccggaagaaaaatgacgacctggcccataccttccagaccctggaggacatctgggatgagtacggggtctatgagaaggtgcaggactgaccgatggccgatgaactgatcgtggtcggcggcggggccgccggcatgatggccgccatttccgctgcggagacgggagcggccgtccggctgctggagcgcaaccccaaggtagggcgcaagctgtacatcaccggcaagggccggtgcaacgtgaccaaccactgtccgccggaggaggtgctggccagcacgccccggaacggccggttcctctacggggccgtgacccgtacgccgccggcgtgggtggaggactttttcaccggcctgggggtcccgctgaaggtagagcggggcaaccgggtctttccggtgtcggaccgggcggcggatgtcatcgacgccctgttttttcatatgaaaaagctgaatatcccggtgacgcaggcccgggcctcccagatctgtctggaggagggacgggtgtccggggtggagaccgattgcggcttctttccctgccgggctgcggtcctggccactggcggctgctcctatccggccaccggctctaccggcgacggatatgagatggcccgggccttgggccatactgtggtctcgcccgttccatccctggtccccttggaggcagaggaggacttctgcggaaaaatgcagggcctggcgctgaaaaatgtgtccctccgggtcaagaaccagaaggggaaggtggtctatcaggagcaaggggagctgctgttcacccattttggcctctccggtcccctggtgctcagcgccagcgcccatatgcgggactttgccagggagcagtacacctgtgtcatcgacctgaagccggctctggaggaacagaagttggacgcccggctggtccgggagctctcggagcaggccaaccgggactttcagaacgtcctgggcagtttagtgcccaggctgatggtgcccaccgtcatcgccctcaccggcatccccggggaccgaaaggcccacgacatgaccaagggggagcgccgccgcctgctggaggtcctgaagggccttgtgatccatatccggggtccccggcccgttgcggaggccatcatcacctccggcggggtgaaggtgggggagatcgaccccaagaccatggggtcgaaaaaggtgcccggcctgttcttcgccggggagctgatcgacgtggatgcctatacagggggcttcaacctccagatcgcctgggccaccggccgggcggcaggggaaagcgccgcccggacctgcctggggcaggacctggggggagcaggggcctgagtaccgtcggaccggagcggagaatcaatcaaattttggagcgaaataagaaatgcaggaaaaaagcgttgccatcgacggccccgccggggccggaaagagcaccctggcccgggccctggcccgggagctggggtatttgtatgtagacacgggggccatctaccgcacggtggccctgcgggcctgggaggcaggggcggacccatccgacccggagcagatcgcccctctgctgaaggggctggacctgcgcatggattatggggcagatggtgtacagcggatgtacttgtctggacgtgacgtgacagaggctatccgggtccaccagatctccggactggcctcccaggtggctgccctgcccccggtgcgggacttcctgctggactttcagcgccgtcaggccatggagcacgacgtggtcatggacggccgggacatcgggacggtggtgctccctcacgccggggcaaaggtcttccttaccgccgcgccggaggcccgggcccgccgccgcctgctggaactgaagcagcggggacaggagacggagctggagaccgttctccgggacatcgtccagcgggatgaacaggaccggaaccgggcggtggcccctctccgtcaggcggaggacgctgtgctgttggataccacggagctgggactggaggagagcctgaaggccctgatctccctggtgaaagggaggctggctcaatgagtacagaacagttctaccgattcctctatctcgtcgtctggccctttttcaatctgttccatccggtacgcaccgtggggcgggagcacatcccagagggggcggcggtgatctgccccaaccataccgccctcagcgacccgttttttgtggctttcgcctttcagaaaaagaaccctctgcgggtgatggccaagatccagctgatgcgggtgcccgtgatcggctggctgctgggcaaggcgggcatcttcggagtggaccggggccatgcggacatgcacgcggccaagacggctctgcgctgcctgaaagaggggcacaagctgctcatcttccccgaggggacccgcgtggaggagggggagaacgtggacgccaaggcgggagcggccatgtttgccacccggacgggggtgcccatcgtccccatgtacatcccggcgcagaagcactggttccgccctaccactgtggtgatcggcgagccttactatccccagatccaggggcggcgggccacggcggaggaaaatcaggagatcgcccgtgagatcatgcggcgcatccacgcactggggggacttccccagtgaagataaggatcgcaaattcggccggcttctgctacggcgtgcgccgggcggtggagctggcggagggggccgcccggtccggcgagccctgtgtgatgctgggtcccatcatccacaaccaggacatgatggaccatctggcccgccatggcctgcgggcggtggtcaggccggaggaggtcccggaggggagcgaggtcatcatccgctcccatggggagagccgcgctgtccacgagggcctgcatgcccggggcgtccgcatcctggacgccacctgtcccaatgttacccgtatccatcagatcgtggcccgggctgaggagcaggggaggcagcccatcatcatcggaacccgggaccacccggaggtgctggccattgcgggctggtgttgccgcccggtggtcctgtctggagcggaggagctggaaaactggctggcggaggacccgtcccgacgccaaatgccactcacttttgtgtcccagaccacggccatccgcagggtttgggattcctgcgtgaaaaaagcaaaaaaagagtgtacaaacgcagaattttttgatacaatatgtggagcgacatcaaaacgccaggaagaggccgtccagctggccgcccagtgcggcgcgatggtggtcatcggcgaccgccagagctccaataccaggaagctggcggagctctgccgggaagtctgtccatctgtccagctgatcgagcgggcagatgacctggagttgtctcctctgcgggggacagagactgtcggtatcactgcgggcgcatccacgcctgcgtggataataaaggaggtctgtgacaaaatgagcgacgaaatcatggagatcgaggaatccttcgctgacatgctggagagatcgatcaaaactttgaatacgggggataaggtaactggcgttatcactgggatcacgccgactgagatctatgtggatctgggcaccaagcacgccggctacattcccgtatccgagctgactgatgaccccaccgcaaaggtggaagatctggtcaaggtaggggacgagatcgagacctttgtggtccgcgtcaacgaccaggagggtgttgtcaccctgtccaagaagcgccttgacgtggtcaagggctgggaggacgtggaggccgcccaggaagagcagactgtcatggagggcgtcgtcaccgaggacaacaagggcggcgttgtggtgtccgtaaagggcgtgcgggtcttcgttcccgcctcccagaccggcctgccccgggagactcccatgtccgagctgctgaagaagaaggttcgcctggtcatcaccgaggtgaaccgtgcccgtcaccgcgtggtgggctccatcgccaaggtgcagcgcgccgagcgcgccgccgccgcagagaaggtctgggccgagatcgaggacggcaagcactacactggcgtggtgaagtccctgacttcctacggcgctttcgtggacatcggcggcgtggacggcatggtccacatctccgagctgtcttggagccgcatcaagcacccctccgaggtggtctcggtgggcgacaccgtggatgtgtatgtgatctccgccgacaaggagaagaagaagatctccctgggcatgaaggaccacagccaggacccctggaccgtgttcacttctcagtaccaggtgggcgacgtagccaatgtccgcgtcgttaagctgatgaccttcggcgcctttgccgagatcgtccccggtgtggacggcctgatccacatttctcagatcgctgaccaccgcatcgagaagcccggcgacgtgctggctgagggagaaaaggtggacgtgaagatcaccgacatcgacatggagaacaagaaggtctccctgtccattcgtgcactgctggaagagcccgaggctgaggaggacgctcctgccgaggagtgatcccgccctaatcctattttaccatgaaaaacagctccctctgccacggcagagggagctgtttttctgatccggtcctgtagggcactgctccaggtccctgactggtgggaggccatatggaccagaaagccgctcatccgggggataaaaagtagccgaatggaggcgttatggtggatttttcataaaatttacttgcaagagagggaatagattggtataataagactggaaaatcagaaattctggtctattttggaggtgagactgttgtttcaggtaggggataagatcgtccatcccatgcacggagcaggtatcgtagagagtatcgtccaaaagaaggtaaacggtgtaatgcgggattactatgtgttgaagctcccggtgcgtgcgatggtggtcatgatccccacagacaacagtgaagagattggagtgcgccccatcgtggaccgggagcaggccgaccaggtgctggcggccatccccggcatagaggtggacatgacccagaactggaaccgacggtaccgggaaaatctggagcgcctgaagagcgggaacctgctggaggtggcccgggtggtgaaggggctgatgctccgggagctggaacgggggctttccactggggagcggaagatgctccactcggctaaggagatcctgatctcagagatcgtactgtcccagagctgtacctatgaggatgtggaagcgcgcataaatacggcgctgaactaatatgctgggagagaagcgcgggcaaaaagggaccggatggtcccttttttcaggcaggaaggtgaaccgattggcaggaatttggaaacgattggcccagagaaagggcagaggggtgcccatctgctcggtggtgatcccagcggcagggtcctcctcccggatggaggggatcgacaagatcctggagcccctgggggaactcccggtgctggtgcgcacccttcaggtgttccagagctgcgatctggtccatgaggtgatcgtggtcacccgggaggatctgatcgtccccgtgagccagctgtgcagggattttatgctggataaggtgaccaaggtgatggtaggaggcgccgagcgggttctctccgtccggatcggggtgcaggaggcccgccgggacgcggcgctgatcgccatccatgacggggcgcggccgctgctgagccgggaggtgctggaggaagtgctgaaaaaggctgcggttaccggggcggcggcgccggccattcccatggtggataccatcaagcgggcagagcggggcgttgtggtggagacgatggaccgctccagcctgtgggcggtccagacgccccaggtctttgaggcgtccctgatccgggcggcccttgaaaaggcggtggcggatggggagactctcacagatgactgcgccgctgtggagcggatcgggatgaaggtctccctcactcggggagacagggagaacatcaagctgaccacccccttcgacctgatggtgggggaggcgatcatccggcagagggagggatattgagtgacacggatcggacagggatacgatgtgcaccgcctggcagagggccggaagctgatcctggggggagtggagatcccctatgagcgggggctcctgggccattcggacgcggacgtcctcacccacgcagtgatggacgccctgttgggcgcggcggcactgggagacatcggttgccactttccggacagcgacccggcctacgccggagcggacagtctagccctgctggaccaggtgatgcagctgctccatgcggagggatggcaggtagaaaatgtggatgccacaatcctggcccagcggcctaaattagcgccctatctgggtggtatggcggatcatctggccgctcatatgggagtggagctgggacaggtgaatgtcaaagcgaccacagaggaggggcttggcttcactggaagtggagaggggatggctgcccatgcggtctgcctgctgacaaaagaataacggaaaatggagcgcgggcaccggaaattccggtgcccgcgctctgtgaagagaatagcaaggaggtgtaggatcagaaatcgatgcggcggccttcctcggcggactgataggcggcgtacatgatcttggtggtctcgtaagccagagcaaaatcagaggagggcgtcttatcgtaggcaatggtctccatgaagtcctggagctcacccatgtagccgcgaatgatctcatcggagacaaaagccttgttccagcccagcttggcgggcagcatctcggagatgtacacatcatccaagccctcttcatccaggaaataggtgttcaggatgtcagtgggggtgatgttgcacatcagggagctgtcgttgctgtaaacctcgatgtagttcttggtgccgcccagtacggtgtcactggcgatggtcaggcacttggtcccgtcggagaaggtaacggtgacggcggcgtagtcctccacgtcttcgggacgggcggcgatgtggcggtgctcatgctcgctgaggcaggcagtggtgacgcccacgtcggcggagacactcttgacagtaatggtctctccccgggccagggcctcctgctgcttcagccacagcatgccagtgaggggatgggtaccggtgcggaccaggatgccgccgccagtcttgttccacttgccagccacgggggagctggagcctttcaggctctcctcacccttcatgaacagcaccttgctcttcttggcgcggatgatctcagcggccttctggaccggagtggcatagacgaagttctcggcgtacaggaacttcttgtcggtagagtccaccacttccttcagctcatccatgatggccatgacctctcgatacatcttggccttctcggtcctgcccacattctcctcgccgggcttgccgaaatagccggtgagaggcttctcacagatgacatgcttgccggccttcagggccttgatggccatggagcagtggaggaaaggaggagtgacgatgtcgatgacatcgatctccgggtctgccagcatatcgtcaaagttagtgatggcctgctcatagccatagcgctccttgacctgattggccagatccaggttcaggtcacagacggtcttgaggcggatgggcactccactgaccttttcatagccgttgccgtggagatgcgcggcatagccggctccgatggtgccgatgaccacgggttttacctgcttgttcatagaaagttcctccttcatgatttgtgaaaggctcacgggcttttcagatttgatagactcaatataggggaaatcacacaaaaagtcaaatgatgctttttcattcaaaattgaaaaaatttaatgcagggcaggcgcatccagaccgcagtatccggcagcccgctgccagcatacattgtattgagagggtatcccctcccggccgcgccgtcggctgcggccacccgtactccaggaaaggaactatgccatgctctattatctaatcgtgtgccgatccctgacttacgcacagcggaccgcctccgccctggagcgggcagggatcacggctcatatcatgcgctcccctaaaagcatcgcgggggaggggtgcagtcattccgtgaaggtctctcagcggaatctgcccgatgcgttaagaatactgcaccgaacagagctggacccccgccgggtctatatcacggcgggagacggcagctacaaggaggtgcagctgtgatctatctggacagcgcggccacctctctgcaaaagccgcctgtggtcgcccgcgcctgctcctacgccatctcacattatgccagtccgggccgaggtggtcacaagccggccatggacgcagcagcagcggcctttgcctgccgggaggcggcagcccgcctgttccaggtccccaagccggaacaggtggtctttaccaacaatgccacccacggcctgaatatcgccataaaggccctggtccgtccgggagggacagtggtcatctccggatatgagcacaacgcggtcacccggccgctccacgccatcccggatgtgacggtccgggtggcggccggacaactgttccggccggaggagaccgtggaggcattccgaaaggccctgaccccggaggtgactgcggctgtattcacccatgtatccaatgtgtttggaatgatcctccccatccaggagctggcccggctttgccgggaacggggggtccccttcatcctggacgcgtcccagtcagcgggctgcctcccggtccatctggaggaactgggggcagccttcatcgccatgccgggccacaaggggctgtacggcccccaggggaccggtcttctgctctgcggacagaccccgccacctctgctggaggggggcacgggaagtgaatccatccggcaggagatgccggacttcctgcccgaccgtctggaggcggggacccacaacatcgccgggatcgccgggctgctggagggactgcgcttcgtggaaaagcagggggtacagtccatcggcagccatgagcaggccctgaccgtccagatgggggagtctctcgcccaactcccgggggtggaggtgttccggagcaaagaccccagccagcaggccggagtactctccttccgggtatcggggatggactgtgaggagctgggggaggcgctgggccgccgggacatcgccctgcgttccgggctccactgcgccccgctggcccaccggacagctgggacactggagaccgggaccgtgcgggccagcgtctccgccttcaacgtcccccaggagatcccacgcttcgtccgagagctgaggcagatcctcagcgaaaagccgtaagaccttacaaggcgtcaaatgccagagatcttgaagagagatccctggcattttttctgtccggctcctgccggaacggccggagcccagggcaggtcctgccctgcagcctatccggcgtcaggggtgacgggagacatattcatgaaattttcattctttccttctcgtttcatgttgccaacttccgcggaatatcgtataattatcaaataggtaattgggcagacccatgcgggccttttgaaaagaggagattccatgagcgaactcatacagaggatgccggcagtcgttcagaccattcgcctgtccgacctggtggatatcgcgatcctgtctatcgtcatatacaaactactctggatggtgcggaagaccagctctgggcgggtgctccgggggattatgatcgtggtggtggccatctgggcctctgccgagttcaacttatacgccaccagcttcgtgctcaaccgggtagtggagtacgccattctggtgctggtcatcctgtttcagccggagatccgccgctttctggagcgggtaggcagcagcaggatgagcaaggtcttcgtccagcccccagaggccgcccacgacatcgacagcgccatctcccagactgtggaggcctatacctccctgtccaaggacaaggtgggggcgctgatggtctttgagcgggccaacctgttggacgaggtcatcaaaaccggcacggcgctggactgtgccgtctccagcgaactgctgaagaacctgttctggaacaaggcgccactccatgacggggcggtcatcgtccgtaacggccgcatcgtgggggctggctgcatgctgcccctctcaggcaacaccaacctcagccgtgacctggggatgcgccaccgggcaggcatcggcatgagcgagcactctgacgcggtggtagccatcgtctcggaggagaccggttccatctcggtggcggtgggcggcatgctcaagcgccacctggcccctgagaccctggaccgcctgttgcgcaatgaactgaagacggacgaggatgacggggagaagaagagcgacctcttccccctggtcgccgccctgttcaaccgagggaaaaaggaggggacagaatgatccagcgtatccagaacagcaagtgggtctttgtcctgatctccgtctttttggccgtgatcttctggatgtacgtccgcaacgacctggaccccccggggagccggacgatctacaacgtaccggtgaccctgacgggagagactatcctggagagtcaggggctcactatcactgcggtctctgacacggcggtggacctgaagatcaccgcccctatcagtatcctgaacaagctgagcaaccgcaatctcagcgtgaccgtgaacgtgtcccagtgtaccgagggggagcagatcctccagtatgacgtgaactggccccgggacgtgagcacagcggagatcaccaaggagtctcaggagcctgccgctatcaccgttatggtggcacggctgtactccaagacctttgagatccagcccgtgctgaaggccagtatcgccccgggctaccaggcgggccagatcaccatcagtccagagaccgtgaccatcagtggctcggaggaggcggtctccagggtggcgaaggtggaggcggtgctggagggcgaagagctcaacacccgcttctccggcaatgttcctctcgttctgctggacgcagaggggaacgagctgacggatctggagatcaacatggacacagataccacctatgtgaccatgccggtctatgtggtgaaggaagttaagctgaccgtagactacacgccgggcggcggtgccaccggcgaggatgtgacctcggccatcatcttcccggactctatcaccatcgccggctcagaggaggacgtgtccaaggtagaggagatctcgctgggcagtatcgacctgtccaaagtggtggggaccaacagcttcaccctacccatcgagctggactccagcctggagaacgtcagtggcatcacagaggccgtcgtcacggtgaccatatccggcctgtccacccgtaccttcaacgtgaccaacatcgattatgacaatgcaccggagggctatcatgtggaggtggctaccgagtcctgctctgtggtggtgcgaggcagcgaggagcgcctggaggacatctctgccagccagctgcgcatcgtggcagacctgtccaatgtgatgacggtgggctccgtctccgtcccagccagagtgtatctggactataacagtgaggtaggcgtcattggagagtactctgttgtggtcaacatcagcagatagtaaaaacggtttttgaggcaaaactttggaggcagcagcatcatgagtcaaaatgccattgtaaaaaaagtggtccatcccggtgtggtggaggtgtcccttatgcgccaaatggagtgcggcctgagctgttccagctgcgagggctgcccccagcgccccaaggaggagatcctggccctggcctctgatccgcaggggggggccaagccgggggactgggtggaggtggagcccgcctccggcagcgccatcggcttcgcccttctggtctttttcctcccctgcgtctttcttctggggggatacctcatcggcaggcttctgggtctgggagacgggggttccatcggaatggcagccgcggggctggtcctgggcttcgttccggcggtcctgatcaaccggaccatcacccggcggaagaccccggaattcaccgtgctggggtatcttcacagcgtgtgaggagagccctgtgtttggatatgtccggcctgtccgggaggaactgaagtgtaaagattttgacctttatcgtgccacatactgtgggctctgccgggaactgcggcggaaatacggcctgctggcacccatgttcctcaattttgatttcacctttctggccctgctgctctggccggcagaacagcggttcgtcccctgccgcggcaggtgccacgccaatccgctggccagaaaggagatgtgtcccgctgatccggccctggaggcggcggcggacgagagcatcatcctcacctactggaagctgcgggattctgctcgggacgacggccccttcagcggcctgccagccagagggctggccctgctcctagctcccgcctaccgaaaggcggcggtctgccggccggaatttgaccggacagtccgttcctgcctggaggagctgacagggctggaggcagaaaactgcccctcaatcgaccggacggccgacaccttcgcccgcatcctccaggcagccgcgcccccctctgaggaccggagccgggatcgggcgctggagcagctcctctaccacttggggcggtggatctatctcatcgacgcccgggacgatctggaggaggaccgcgcctccggctgctataaccctgtccgcgcccgatatggggagggaggggacgaccaggcgctggccctgactctggagcactccctaaatttggcccgctccgcgttctgcgtaccggactttggctgccgaacccctgtgctggagaatatcctctatttggggctccccatgatccagcaggccgtctttgatggcagctggtcccgtctgaaaaaagaaaagatttggagaaaacctacatgaacgatccgtacagtgttttgggggtcagccccaatgccagcgatgaagagatcaaaaaggcctatcgtgagctcgcccggaagtaccatccggacaattatcagaacaatcccctggccgatctggctgaggagaagatgaaagagatcaacgaggcctatgagaccatcaccaagcagcgcagcggaggtgggggctcttatcaacgtccgtccggcggatacggcgggcagagctatggcggcggataccaatacagtcatcaacagagcggctccgccaaccctacctacgcccgcatccggaacctgatcaacagcggagatctggggacggcggagcgcctgctcaacgaggtgccccagaaaaacggggagtggtatttcctttccggcagcatcgcctaccggaagggctggctggatgaggcgatgcagaactactccctggcctgccagatggacccagggaacatggagtaccgccaggccctggccatgatgcagcaggggggacaggcataccgcccctacggatacagcggagggatggacggtctggactgctgcaccagcctgctgtgcctgaactgcctgtgcggaggggggcactgctgagatggcctcttttcacaccaccagccgccgcaccgcggttgccggggtcctggcagctgggagcctggccgtgctctggctggcctgtatggttccgtcagggcgcatcggcctgaccggcgcggccggtctgtttccggtggccgcggtgctggccgccggacgggcggcgggctatctgtgctgggccgcatccgccctgctggggctgttcctgctgccggacaagggggtcgctctgctctacctgatcttcttggggctctacccggtagtcaaaaacaacatcgagggcctgcggcgcctgcccctggagtggctgtgcaagctggcctgcttcaacgcggccctgtctctcttctggttcgcgctgcgggcgctgttcctgcccgatccccctgtgtggctgggggagaggacctggctgctctatctggcagggaatctgatcttcgtcctctatgacgtgggcctgtcccgcctgatcgcgctggtgatggcccggatgccggggcgccgccgctgaaatcaaaataaggaagtgaaccgcaccaatggtgaaaagcatgaccggctacggccgggcggagcagagcctgaacgggcgtaccatcacggtggagctccgttccgtcaataaccgatatctggattgctctatccgcattcccaggctctatctgtttgcggaggatgggctgaagtctcaggtccagagttccatttccaggggaaaggtggatgtcttcgtcacaatagacagcgcaggcgccgccggcgtgaaggtctccatcaatcggccggtggcggacggatactgcgctgccctgcgggagttggcccagagctatgggctgtccgatgacatctccgtctccctgctctcccgatttcccgatgtgctgctggtggagaaggaagaggaggatgcggagcaggtcgcccaggacatcagtgccgtcatggaacaggcgctgtccgactttgaccggatgcgcagccgggagggccagaagctatctgatgacatcctgacccgggcggacaccattgaacgcctggtcaccctggtggaggagagatccccccagaccgtggaggaataccgggctcgtctggaggctaaaatgaatgaggtgctggccaacacccagctggacccggcccgcatcctcacagaagcggccatctttgctgacaaggtggcggtggacgaggagacggtgcgcctgcgcagccacctggggcagctgcggcacatgctggctcagggcggagccaccgggcgcaagctggactttctgatccaggagttcaaccgggaggccaacaccatcggctcgaagtgcagcgacatcgagatcgcccgctatgtggtggatatcaaggctgaaatcgagaagatccgggagcaggtccagaacatcgaatgagggggcgggacatttgaagctcatcaacatcggatttggcaatatgatctccgccggccggctggtggctattgtgtcgccggattcggcccccattaagcgcatggtgcaggaggcccgggaccggggcacgctcatcgatgccacctatggccgccggacccggtcggtgctcatcatggacaacgaccatctggttctctcagcgcttcagccggacactgtggccagccgtctggagagccgggaggcccctgaagcagaggaggatgaggaatgaccaaaaagaaagagaagggacagctcatcgttttgtccggtccatccggtgtgggtaagagcaccgtgatcgcagagcttttgggccagcggaaggggatctatttctctgtgtcctacaccacccgccggccccgggtgggagaggcagacgggatcaactacaacttcgtctcccggacggagttcgagaggatgatcgcggaccaggagctgctggaatacgcggaatatgtgaacaactactacggcacctccctgaagatgatccaggaaaaactgaacgccggcatcgacgttctgctggacatcgaggtgcagggggcggcaaaggttcgggcccgatgccctgaagccatctttatctttatcatcccgccctcctttgaggaactctcccgccgtctccacaaccggaacacggacaacgaggacgtgatcgccggccggctggagaaggcgaagatagagttccgggagatcccgacctacgactatctggtgatcaacgacaaggtctccaacgcagtggaggaaatcgaggccatcctggtggccaatgagtgccgggtggacaaccgcagaaacattttgaaaggggaattttcgttatgatgctttatcctgctatgagagatctgctggctaaggtgcccagccgctatcagctggtcaatgtggtggcctgccgcgcccggcagattgccagcgaggcggagaccgccggcgtccctctggacgacaaaccggtgagcattgccatccgcgaagtagcggagggtcagctggacgtgtctgaatcgtaagcaggcggcgaggagcaagcggagggaggcttcccacgcttgctttgccttgtacggaagaggaggggatcggtatcgggagagtggtggccaaggtggcggtatccaaagcgatctacgccatcgacaagccctatgactatctggtccctccggagctggagggacaggtactgcccgggatgcgggtggccgtccctttcgggagcggaaaccgtgggtcggatggcatcgtgctctccctggaacggcaggaggagaacacacccacactgaagccggtgctgtcctgtctggacgacgctcccgtcctggatgaaaaggggatccatctggccctgtggatgcgggagcggtacttctgcactgtcagcgacgcggtgaaggccatgctcccggcggggatgtactttgccctgcgggacagcgtgaccttagtccccgggctggagccggaacagatctgggatctgctctcggacgctccagctgccgccaggctggcggagatgctctgctgctggggggggagcggggacatgacccagatccacaccgcctttggcgccaaggaccccacccccgccatccgggtccttctggaccggaagatcgcggtactggagaccagcgcccagcgggcggtgggggacaagacagagcggctggccgtgctgaatatgccggcagaggaggccatggagctggtcgcctccagacggaagcgagctcccctgcgctacgcggtgacggagctcctctgcactctgggggcggcctccaccaaggagctttgctattttaccggcgcctctcccgccacgctgcgatctctggaaaagagcggcatcctcaccctggagaagcatgaggtgctccggagggtccgggtagaggacgtggagcccgccggaccggtggaattaaatcaggagcaggaggcggccttccgcggcctggaccggttctgcctccggggggaggcgggcgccgccctgctgtacggcgtcaccggcagcggaaagacccaaatctatatccgcctgatccaggaggtgctggccagggggcagaccgccatggtactggtcccggagatctccctgacgccccagctgctgcgggtgtttgcctcccactttggggagctggtggcggtgctccacagctccctgcgcagcggagagcggtacgacgagtggaagcgggtccgttctggcgcggcccgggtggtgctgggcacccgttccgctgtttttgcccctctggaccacatcgggctgatcgtgctggacgaggagcaggagagcagctataaatcagagaacgccccccgctaccatgccagggacgtggcaaaataccgctgtgtccagcatagagcggtgcttcttctgggctcagccaccccggcggtggagtccatgtaccaggccagggaggggcgctaccgtctgtttaccctgagccaacgcttcaaccaacaggccatgccgcaggtccgcattgtggatatgaagcgggagctgcgggcggggaactgcaccgccatcagtgcggagctgcgccgggagctggcctgcaacctggaacgcggggagcagagcatcctgttcctgaaccgccggggcagcagccgcatggtctcctgcggggaatgcggacaggtcccggagtgcccacgatgctcggtgcggctgacctaccactccgccaacggaaggctgatgtgccattactgcggctattctgagccccttccccctgcgtgtccttcctgcggcggcaggctgaactttatcggtgtggggacccagcgggtccaggaggaactggaggcactgtttcccgggatcgagatcctccgcatggatgcggataccatctccgccgcccacccccacgaggagcttctatcccgatttcagaaacagcgcgtccccatcctggttgggacccagatggtggccaaagggctggactttgacaatgtgaccctggtgggggtggtggacgcagatctgtccctctatgccgccgacttccgcgccggggagcgcaccttctctctgatcacccaagtggtgggccgggccggccgcggggagaagcgggggagagcggtgatccagacctacaccccggacaacgacgtcatccgtttcgccgccggccaggactatgacagcttctatgagcaggagatccagctgcgccgcctgcgggacgagccgccctttcgggacatcctggtgctgaccgcctccggccccgacgaggcgggggtgctccgggtgtgcacccggctgaggcagtttttggagagagagctccccaaactgcccgatcagtccttccgcttgctgggtcccgcgccggcagtcatcgccagagtcaacaaccggtatcgataccgcctcacactggtcggacaggacagccgccctctccgttccctgatcgccgccctcctccgggcggtgcggcaggaccgggagagccgggggacttctgtatttgccgacctgaatcccatggattgattatgcaaaggagaaatgtttcatggcgcttcgagagatcatcaaaaagggggaccctgtcctcgagaaacactgccatccggtcacacgcttcgatcaaaagctgtgggatctgctggacgacatgcgggagaccctggcccaggccaacgggctgggcctggccgcgccccaggtgggcatcctgcgcagagcggtcctggtggtcaacgaccaggaggagatgctggagctgatcaaccctgagatcattgccagcgagggggaggaggacggcctggagggctgcctctccgtgcccggttactggggctatgtgaagcgtcccgcatgggtgaaggtccgggcccacgaccggaacggaaatgagtttgagactgaggggacaggcatgaccgcccggtgcttctgccacgagctggcccacctggacggacagctctacacggatctggccgaccggatctacaccaccgaggagctggacgccatgctggaggagcaggggaaatgacgattctctttatgggcaccccggatttcgctgtcccgtccctagaggcgctgattgccgcaggacacaccatctgcggcgtattcacccagccggaccggccgaaaaacaggggaatgaagctccaggcaccacctgtaaagcgaatagcccttgcatatgatattcctgttttccagcccgttactctcaaggacggcactgccctggaggagatccgccagctgtcccctgagctgatcgtagtggcggcctacggccgtctcctgccccgggaaattttggagctgccggccaaggggtgcatcaatgtgcactcctccctgctccccaagtaccggggggctgcccccatcaattgggcggtgctcaacggggaggaggagaccggggtcaccatcatgtatatggcccaggagctggacgcgggggacatcatcgcccaggcgtccaccccgatcgatcccgaagagacggtggagtcggttcatgatcggctggccgggctgggcgcccggctgctggtccagacagtgtcccggctggaggccggaacggcggagcgtaccccccaggacggggaacgggccacctatgcgcccatgctttcccgggagctctctcccattgattggacccgcccggcccgtgagatccacgaccagatccgggggctgatcccctggcctgcctccagcaccgacctgctgggtgctggtgtggtgaaggtgtttggcggtcgagagaccggggagtccaccagccggcggcccggcaccatcctttctgccgacaaacggggcatccgggtcgcctgtggagatggaaaggtgctctgcttgacagagcttcaggcgcctggaagtcgacggatgtctgcggcagactatttgagaggacaccctgtttcggcggaagaggattgagacccattcagaagcgggaggtgaagccctgtggatgcccgagaaacggcgctcctcaccctgaacgcctgtgagagacaggggggatggtcggacggcgccctgaaaaagcagatatcggcggccggattggacagccgggacgcggcgctggccacccagctgtgcgccggtgttttgcagaaccagatgctcctggacttctacctggcccatttctccaatatccccctcaagcggatggaggggcgggtggtccaggccctgcgcctgggggcctaccagatgctctttctggacaggatcccccacagcgcagcggtcaaccggtccgtagagctgacccgggcctactgcaagaacccccgggcggcggggatggtcaacggcatcctccgcagtctggagaggagcctggagcgtctgcccaccatcccacagcgggacccggtggagtacctgtccatcctgtacagccatccggcgtggatggtgcgggaattcctgctgactctggggaacgacggcgctgcggccctgctgcgggccaacaatgcgcagcctgccacggcggcccaggtgaacaccctgaagatcaacgcccgggagctgcgcctgcgcctggaggagcgaggggtccgggcagaggaacacccctggctgacagactgtatcctcctgtctgggaccgggaatctggaggagctgccggagtttcaggcgggtctcttctacatccaggacccagcttcccggctggcggtggcggcagcaggccctgccgcggggatgcgggtgctggatgcctgcgcggcgcccggcggcaagtcctttgccgcagctatcgccatggggggcaggggaacggtgtgctcctgcgacctgcacccccacaagaaaaagctgatcgccaacggcgcggcccgtctgggcctggactgcgtcacgcctatgacggcggatgcttgcgtccaccgcccggagtgggagggtgcctttgatctggtgcttgtggacgccccctgttccggtctgggcgtcattcggaagaagccggacatccgctacaaggacccggagcccctggcagcccttcctagcgtacagcgccgaatcctggagaacgtctcctcctatgtgcggcccggcgggacactgctctactccacctgcacgctgctgcggcgggaaaatgaggatgtggtgtccgccttcctggaggcgcacccccagtttggacccgagcccttccagctgcctggcgtccccggaacggaggggagcagctggatgctgacgctgtggccccacatacaggggacggacggcttctttatcagccgcatgaaaaagagggaggaagccctttgatcgatctcaaatccatgacgccggaggagctggccgcctggttccgggagcagggggaacccgccttccgggccaggcaggtgtttcagtggctctatcgaggcgccgtctcctttgacgaaatgaccgacctccctaaggtcctgcggcagaagctggaggagcactgttttcttacagctccccaggtggccagaaagcaggtctccgcccaggatggcaccatcaaatacctgtggaggctgtcagacggaaactgcatcgagacggttttgatgcggtataagcatgggaatactgtgtgtatctcctgtcaggtgggctgccggatgggctgtgctttctgcgcttccaccctgggaggcaaggtgcgggaccttacgccggcagagatggtggaccaggtcctcttcacccagttggacagcggggagccggtctccaacatcgtgctgatggggatcggggagcccctggacaatatggatacggtgctgaagttcctgacactggtcaaccagcccaatggtctgaacatcggcatgcgtcacatctccctgtctacctgcgggctggcggatcaaattgacaaactggcccaacataggttacaattaacactatcggtctccctccacgcgccggacgatgagacccgctcccgtctgatgccggtgaaccggagcgtgggcgtggaaaagctgatggcagcctgccggcggtatttccagaccactggacggcgcatctcctacgaatatgcaatgatcgacggggtcaacgactctgactggcaggctgatctcctggctcggctgctgaaggggacacccggccatgtcaacctgatcccgctcaatgatgtggaggagagtccactgaagcccagccgcagggtggccgcttttcagcggcgcctggaggggcacggcgtgaccgttacggtgcgccgcaagctgggaggcgatatcgacgcctcctgcggccagctgcgccgaaaggccatggctcagacactcggccggaatgacggcaggaaagaggcagatattccatgaatgtatgggggatcacccaccggggaatggtacgagagcagaaccaggatgcgtttgcctgccggaccctgccggacggccggatcattgcgctggtctgcgacggcatgggcggcgcccgggcgggcaacatcgccagcaccatggcggtggagctctttatggaggaattcctttcacgaaaggaggacgagtctgaccgggtccggatggagcgggcggcatcccgcgccaatgacgaggtcttccaccgctctaatgtggacatggagtgctccgggatgggcaccaccctggtggcagccctggcggggccccacgagacagttatcctcaacgaaggggacagccgagcctatcacgtcaccccagaaggcatcacccgggtcaccagggaccactcgctggtggaagatctggtggaacgaggggatctgacccgagatcaggccagagtccatcctcataagaatctcatcacccgcgccttgggggcggagtcccatcttcgggcggactgtttctatcttcaggccctgcccggccactacctgctgctgtgcagcgacggcttgagcaatgtagtgaccgaccaggagttgctctatgaggtgatccacggcggggaggcggtcacctgctgtgagaggctgctggatatcgccctgaaacggggcgcgccggacaacgtgacggcggtcctgattcagtacgaataacagcgacaaaggaggcgatttaccatggatcaatacataggtaaattactcgataatcgatatgagatcctggagatcatcggcaccgggggcatggcccgggtgtacaaggcacgctgtcaccggctcaaccggctggtggccatcaagatccttcgggaagatctggcccaggacgcggagttccgccgccgcttccacgacgagtcccaggccgtagccatgctttcccacccaaacatcgtggccgtttatgacgtcagccgctcctccgacctggaatacatcgtgatggaactgatcgacggtatcaccctgaagcagtatatgcagaaaaaggggaacaagctgaactggcgggaggcactccactttatcacccagatcgtcaaggcattggggcacgcccacagccggggcatcatccaccgggacatcaagccccacaacatcatggtgctgcgggacggcagcgtgaaggtggccgacttcgggatcgcacgggtggcttcaggcgggcacagcaccctgactcaggaggcgctgggctccgtccattatatctcccccgagcaggccagagggagccatattgacgcccgctccgacctgtactctgcgggggtggtgctctatgagatgataactggccgcctgccctttgagggggacactccggtctccgtggccatccagcacatcaattccatcccactctccccccgtgagctggaccctaccatcccagaggcgctggaggccatcaccatgaaggccatggctcccaacccggacaaccgatatccctccgcagacgcgatgctggccgacttggaagagttccgtaagaaccccagcatcaactttgactacgacgtgagcgagttcgtgcccgaggagccggaagagggcgccatgactcagatccgcacgccccatacgccggtgcgcagccgtgtgccggagcctgaaccccgcaggcgccgctacgaggagccggaggaggaagaggaggagccggagaaccgtcccaggcgccgggaccgccggcggggagggacaaactggcccatcatcgcggccatcgttgtcatcctggcctttgtggcgggactgttctacttcatgtatcagttcttcatctcctccatcctgatgccctcgccggactataccatccccaagctgacgggctacacctatgaggaggtccttcaggacccggagctgagacaggagttcaacatcgtcgttggccagacggtggaaagcgaggaggctgcggggacgatcctcaggcaggaccctgctgccgggagcaccgtgaagtccaacaacgcagaaatcacggtgacggtgagcggtggacccgaggtgatccagatgatcgatgtcaccaaccaggaatatctgaaggccctggccaccctgcgggacatggggctgagcgtggaggcccccgaatatcagttcgatgatgaggtgcccgccaactatatcatctcctatacccctgcggaggggaccgaactcaaggcgggggacagcgtccatctggtggtcagtaaggggcctgaggcgtccaaggtcacgctgatctctttcgcggacatggcccagagcgacgcggagagccggatccgtctgatgaacctggaggtgggtgagatagagcatgtctccagtgaaacagtaccggagggaaaggtagtggaacagtggccggaggctggtacagaggtggaagaggggagcaaggtcaaccttaccgtcagtacagggcctgagaacccggacattcctcagacatcaaccaagacactcaccatcaacctgccggtggtggatgagacggaccctgtccagtccatcaatgtgatggtcaccagcgacgacggaaaggaagtttataaccgggatgtgaaccctcttatggaagtggctgtgtcagtaccggtcagtgggacagggaaagtgacatacaacgtctatttcaatgggagattggaccacggcgtcacggtcaactttgacgagtgatatggcagaaggaatgattttaaaagccctcagcggcttctactatgtggacgacgggactcagctgttcgcctgccgggggcgggggaagttccgccatgagaaggtgacccctctggtgggtgaccgggtgctgtttaccccgctggaacacgggagcggctcgctggacgggattctccccagaaagaatgagttccagcgcccggcggtggccaacgtggaccaactggtcatcatcgtgtcccaggcggtccctgccaccgatcccttcctcattgaccgcgtgatctccatcgcggagcgccggggatgtgacagcgtcatctgcgtcaacaagtgggacttggtgccgggggaggacctgtaccagatctatacctccgccggcttcaccaccctgaaggtgagcgcggagaccggcgaggggatcgaagagctgcggcaggtcatttctggaaaggtgtctgccttcacaggaaattccggcgtcggtaagtccagcatcctaaatgcactggagcctgggatcgccctgcagacaggggagatcagcgaaaagctggggcggggtcggcacaccacccgccatgtggagctctaccggctgagcggcggggctctggtggccgacaccccggggttctcctcctttgatacggaccgcatggagctttgccgcaaggaggagttggagggctgcttccgggagtttgccccttacctgggaaaatgccagtttaccggctgctcccatgtgaaggagaagggctgcgcggtgctgaaggcggtggaggccggagcgatccagcccagccgccacgccagctatatacgcctgtacgaccaggccaagcagatcccggactgggcgcgataaaattttatcagtggaacagtgacacatcgcctccccgtgcatagactggattagccggaaaacggccagtctatgcggaggggaggctttcttatgggcatcgtcgtggtacgttctcccagatgtctgcggggtctgctgcggaagctgtttggcctgaagtgatcccggggcccagggggcactgagtccttttctgagggtggcatatttgtccctgcctgtacatatagtggtcccaaagcggaatggctgacccggcgcggcggcccaggccgcgccgactcgatttgtaagggagaggacgattatggagcttgagctcaaacgagatgcgatccactgctttgagaccgtagcagacgtcaccatctgtcaggaggagacccaggaggctatcgttccggatgcctgtccggacattctgcgcatcgttgaggtatgcggtcaggcgtgcctcacaggaaaacaggcccgggagggaatggccaccgtctccggcatggtgcgcgcctcggtgctgtatctgccggagacggggggatgtctgcgccatatggagctcagcgtccccttcacctgccaggtcgaggcccccggcctgacctcccaggggaccattttggccgatccccgcctgcggtgggcggaggcccgggtgctgaatcccagaaagatcctgctccgggtggacctggccgtggagatcagggcctgccagccctgtgagcgcaccatatgccaaggggtagaggcggcggaggaacatggtatccgccagctccaggaggagcagaccaccgatcagatcatagccgtgcaggaaaaaccctttacatttacagatggtgtggacttggggctatcagagggtggtgagctgctcagcctccggggagagccatcctgtgaggagagccgtctcattggcagcaagctgatcttcaagggcagtgtggagctccacgccctcctgcgggacgcggacgggacccttcggacagccagggagtccatgcccttttctcagatcatcgaagttcctggggccggagaggacgcggaatgtgaggtgcgggtcgtcctcaccgatctgaatgcccccgccattgggacaacggtgggctccgccgaggtgacgctggagctcctggcccaggcggtggtgaggagccagcggccggtcaccatgcttcaggatatttacagcaccggatggatgctggaggtccagaccgaggaacacaccatgcgccaggtggtggatcagtccattcggccccagagcgtccgtgagatcctggagaccaccaccctggtacgaaacgccatagacgggtggctgtccctaggggagatccggcagagccgggagggcgaccagatgatcctttcggcagaggtactcatcacggccctgtatctggatgacggggaggagcttcagtctatccagcgcaccgtccagacggactgcaggctggactgcccggtccaggcggtgtgtcagtgctggtgtaccgccccaggcgaactggccgtggtgccggcggccggcggactggaggtgcgcttcactctggaattccactgcctctgtctggcggagcgcaggcaggccgccatctcctccgcgcgtctgggggaggaacgggccaagccggacgggacacagccctcggtggtgctgcgtatggccgctccgggagagcggctgtgggacattgcgaaagcgtacggtactaccacagaggagatcacccaagccaatgagctggaggagggctgcctgcccacgggcaggatgctcctgatcccccgggtacgctgatctcatcggcaaggagccggaccgggcctgtcggcctgcggtccggctcctttttcaaacaaaggctggaaaagctatgcggcaaggtcatattccacagcttatccccatacactgtaaggaaatcaccggcttgctcggccgaaggaggaatttcagtggaagatcgcaaaatctacgaggatatcgcgcttcggaccgagggcgatatctatatcggcgtcgtggggccggtccggaccggaaaatccacatttatcaagcggttcatggagacgctggtcatccccaacattgaaaatgtgtaccgccgggagcgggccagggatgaactgccccagagcggctccgggcgtaccatcatgacggcggagcccaaatttgtcccggaggaagcggtagctgtcacaatggaggggggcgccgccttccaggtccggctcatcgactgcgtgggctacatggtggagggagcggtgggacatctggaaggagagacccagcggatggtgaccaccccgtggttcgatcacgagatccccatgtcggaggcggcggagatcggcacccggaaggtcattgcggaacattccaccatcggcatcgtcatcaccacggacgggaccatcaccgagattccccgggaggactatctggaggcggaggaccgggtcatcacggaactgaaggagctggggaagccctttctggtcctcctcaactccgcctatcccaactcggagcgggcccaggccatccaagcggacatcagccagcggtacggggtggcctgccgggcactcaactgcctggagctgagcgagggggacatcaacaccgtcctgaaggatgtgctctacgagttcccggtgaaggagctggacctgttcctgcccccctgggtggacgccctggctcaggaccaccccatcaagtccgccctgtacaccgccatccgggagggggcctccgacctgtaccgcatccgggacgtggagcagacggtccgctccatcaaggagtgcgaggaggtgagcgacgcccgggtgacctccatcgacctaggcaccgggctggccgctgcggtactggacctgcccagggccctgttctaccacactctgtcccagcagtccggcttccagatccaggacgacggagatctggtctctctgctgacccagctggctggagtcaaggcagcatatgacaaggtggcagacgctctgaaggaggtggaggagaccggctacggcatcgtggtgccctccatcgattccctggtgctggaggagccggagatcgttcggcaggggggacgctacggcgtccgactcaaggccagcgccccctccatccatatgatccgcgcggatattgagaccgaagttgcccctatcgtgggtacggagaagcagagcgaggagatggtccactatctgctccaggaatttgagggggacacctccaagatctggcagtccaacatttttgggaaatccttctacgagctggtgggggaggacctgaacaccaaggtcaagcggatgccggaggacgcccgggaaaagctccgggagaccctccagcgcatcatcaacgagggctccggcggactgatctgcatcatcctgtaacaaataagagggcagggcgctccaatcgcgccccgccctctaatattatgtcaactgggagaaaactgcttcatagtcctttccaaaatactgcagctaatgtgagcatgagcctttgccttttggacctatctgcggtataataacatgaaagcggcctcccggccataggatggacgggaggtgtatgccaatatgaaacatgtcatttcggtcctgtgcgtcctagcggtactgctgtgtatggcccccttcgtgtctccgaacggagagggagaggctgtctccgccgctgcccgcacggagacaggccccttcatcgtggatgccggccacggaggagaggacggcggtgcggtctcggcagacggcacccaggagagcggcatcaacctggccatagcccttcggctggaggacatcctggctttctgcggtgccgcccccgtcatgctgcgccgggaggatatctccctgcacgacccggaggccggttccctgaaggagaagaagtcctcggacctgcgcaaccggacccgggccgtccaggatctgtccggcgccaccctgatcagtgtccaccaaaacagctacccggagagccgctacgacggtgcacaggtgttctacgcacccacagagggctcccaggcactggccgaatacacccaggagatcctgcgccaaacgctggacccggacaacggcaggcaggccaagcagatcccagacacagtatatctgatgaatcacattgacaaccgggcgattttggtggagtgcggcttcctcagcaatccacaggaggccgccaggctccgagacccggtctatcagaccaagatcgccgcagccttggccagcgcctgcctgacctttcagggggagcggatcacggcccataccacagagatttgaggatgaaatatgaaggccaagacggtattttattgtacggaatgtggaaatgagacgcccaagtggcaggggagatgcccggcctgcggggcctggaatacggtggtggagcggcccgcagaacaggcccccaggaagggagggcccgcccgggggacatccggtatcggcgtccctctcagccgtcctaagtccatggaagaggtggaggtcaccgatgagctgcgcttccgcaccgggatgggagagctggaccgggtgctgggcggcggagcggtgcgcggttcattggtgctggtgggcggcgcaccgggcattggaaaatccaccctgatgctccagatctgcgacaacctgtgccggttcgccaaggtcctgtatgtatccggtgaggagtcagagcggcagatcaagctgcgggcccagcggctgaacgtggccggcgaggggctctatctcctgtcggaaacgaacctggaacacgtgctggacgcagtccacagcctccagcccgatgtgctcatcgtggactccattcagaccctctatcacggggatatcagctcggggccgggaagcatctcccaggtgaaggagtgtaccatgtccctgatgcagctggcgaaaggggaggggatcaccgtctttgtcatcggccacgtgaacaaggagggatctatcgccggccctaaggtgctggagcatatggtggactgcgttctctattttgagggagagcggcagatggcctaccgcatcctccgggcggcgaaaaatcgctttggcgccaccaatgagatcggcgtctttgagatggcagacgcgggactgacggaagtgcccaacccgtcggaggccctgctggccgggcggcccaccgacgcccccgggacctgcgtcacctgcgtgatggagggggtgcggccagtgctggcggaggtacaggcgctggtggtgccctccagcctgggcaatccccgccgggtgagcaacggggtggactacaaccgggccatgctgctgctggcggtgctggaaaagcgcggcggactgatgctcagcggctgcgatgcctatgtgaacgtgattggcggcctctcactggaggagcccgccgctgatctggccgctatgatcgcttttgcctccagcttccgggacaggcctgttcccagcgacttggccgccatcggagagatcggcctgaccggcgagctgcgggcggtgagtgccctgggacagcggctcagtgaggtgcggcgcctgggatttaccaaatgcctgatcccgaaacgggtccaaggaaagctgtctgttccggagggcctggacgtgatccgggtggccaacatccgggaagcactggccgccattttgtaagcggggaacaaagttgacacagccgctcccgccggtactcccgcaggatgccgcccgggccagagagcagtagccgtcctgttggtagacgcaggggtcggtgcagacgatcaggctcaaaagatcacaccttttttgtttggctgaaatgcgggccatgatatcatggtcatcagtgtgcccagatgagagatatctatgcgaaaagaccgcatcaggaagctagagtctttctgatgcggtcttttcgtgcgcatgatttatgcgatggccgaccggctcttgcaggcgtccctggaggccaaggcggcaaaagccggccgcagggcttgcgaccgctccgccggtgtggtatgatgcaggggaagcactgcgaagggaggtactgcgggaagactcgtaggtcaacaaaataaaaattttgttgacctgagaggaggagcaataggagaaaaccgcgttttcacccatccaaggcccgcaggctgcgatttggactaccgctcagaatcaccacccatccttcgggattttctggtctatcatgagaccatccagggccactccccaaaaaccgtggacgaatactttctggatctgcgcagctttttccgctatctcaagctggaaaaacggctcgtccccaaggatacgcccatggaatcgatccccatcgatgatgtggacatccaactcatccgctccgtcactctgaccgacgtctacgcctatatgagctatctcagccgagaccgcgcggcccatccgaacagcccagacaccagctatggattgtctgcgtcctcccgggcacgcaaggtggcgaccatccgctcattttataagtacctcaccaacaaggccaagctgctgactgagaaccctatgcaggatctggattccccccgcatcaagaagtcactgccccgttacctggatctggaagagagcgtggaattgctggagtcggtagacggagctaactctgtgcgggattactgcatcctgaccctgtttttgaactgcggcctgcggatctcagagctagtcggcctgaacgtgaccgatgtccggggcgatcagctcagagtcctgggcaagggcaacaaagagcgggtcctctttctcaacgaagcctgtcagcaggctctccaggattggctgacagagcggaacatgctgacactgattgataaggaggccctcttcatcacccatcagaaccgccggcgcatctcccgcgctgcggtgcacaagctggtgaaaaagcatctggccgcttccgggctggacagcacccagtattccgcccataagctgcgccacactgccgctactctgatgcttcaaaacggcgtagacgtgcgcactttgcaggaggtcctgggccacgaccacctgaacacgacccagatatacacccacgtggacagcgatgatctgcgcaccgcagcccgtgccaatcctctggggatggtaaagaagaaaaaaaggggaagtgaggacgagacatgaaccgatattcctggctggagggctatctgctgtccatgcccggtgccgtcaccgactacaaattggaatggcagtggcagcgttatttggtaggcgggcggatgtttgcagccgtctgcaccccaggaccggaacacgccgcccatgctgggcggactatggtgatcctgaagtgcgatcccaggctggccgaggcatttcgcgagcagtacccggaggtagtgcccggtttttacagcgataagcggaattggaactcggtctatttggacggggctctcccggacgacgtgctgcgggacttttgcggcatgtcctatgaactggtattccagaagctgaccaagcgggcccaaagagagatcatggaacaggaagaaaaaaggagttcgtgacccatgtattatgtactgttcgtctttgccatgctcacgccggtcctgatggcggtggtggggctgatttggcgcatccatccccccaagcgggacggtggctttctagcctaccgcaccgccctctccagcaaaaccgaggagacctgggccttcgcccaccggcacatctctaagctctggctgcgcatcggactccttctcagcatcctgtccgcagtgcttatggttgtgttccgggagagtgcctcctcctttgtactgtggctgatcggcggacagatggtatttctgtgtatctccgcatttctggtggatgccctgctgaaaaacacttttgatgaaaatggcctccccatagagcgttaaagcgatagacctcccaaaaccaattgggaggtctatcgcttatctggggcggacccccagaatatggatgccccgcagggcttgatatgggtaggtgctcaacggccggaagtcggcgtcctggctgtgggcggccaccagaatggtgtcgggaaaggccggctgccggatctccaccacgataggatcatgggcaaagacgccgccggcaaagctgagctggataaaatcccccggctccagttcacccagtccggcttccgtgccaaagggccccggcctgctgtcctttcgggtcaaaaagttataaaagtagggcacgccgctccaggacggagatttctgatttccgctgatgtagtaccatccgaaggtaggcgtatggtccatcacgccgctcccagcataaaggcattgggatgcgaagttggtgcagtctccccccagttcagagaaatcgtagtacgccggattccgatcatacgcccaccggtgggcatagcgcaccgccgccccgcggtcatagggcaggatatcgtgcaaaggacctctcccctctcctgcccccattttatgcagaaaacggtcccgggttcatctcacctgaaagttctgtctccttcttctcaccatgggcctacggggcggctttggcgaactaggtatgaaaaaagggagcgccgaagcgctcccttttcaaaaggcagaagttcgatcaggccttgccgtcgcagcccagcacgttgatcagcttatgcttgaccagctgcttgatgttctcacgggcgggcttcagatactgccgggggtcaaagtcggcgggatgctcggcaaaatacttgcggatggtgccggtcatggccagacgcagatcggagtcgatattgatcttgcacacggcgccccgtgcggcctgacgcagctgatcctcggggatgcccacggcgtcaggcatcttgccgccattctcgttgatcatcttcacaaactcctgaggcacggaggaggagccgtggagcacgatggggaacccaggcaggcgcctgacgatctcatccaggatgtcgaagcgcagcggagggggaaccagctcccccttctcattgcgggtgcactgagcggcagtgaacttgtaagcgccgtggctggtgccgatggcgatggccagggaatcacagccggtgcgggagacgaactcctccacctcttcaggacgggtgtaatgggagtcttcggcagacacattgacctcgtcctccacgcctgccagagcgcccagctcggcctccaccactacgccgtggtcgtgggcatactccaccaccttcttggtgatctcgatgttctcctcaaagggcttggaggaggcatcgatcatcacggaggtgaaaccgccgtccacgcaggacttgcacagctcgaagctgtcgccgtggtccaggtgcaggcagataggcaggccggtctcagcgatggcggcctctaccagcttgatcagataggtatggttagcataggcccgagcgcccttggagacctggaggatcaggggggcgttgacctctttggccgcctcggtgatcccctggacgatctccatgttgttgacattgaacgcgccgatagcgtatccgccgtcataggcctttttgaacatttcagtggtcgttaccagtggcataatgaccatctccttcttcaaatttacatgttatattgtaccatttccaattgcgaaatacaataggacatggtatgatttactttggaattttcaataaagaaatgtgcagttttccaatcccgctgcaagatttttgaaggaggcaaccaacatgaatcaactgactggagcctgtatcatcggccagtccggcggccccaccgccgtcatcaacgccagtgcccagggcgtcatccagaccgccctgaagactccctgcatcactcaggtgctgggcgccgcccacggcatcaagggtgtgctggaggacaagctgtacgacatggctcaggaggaccccgctgagctggacctgatgaaatacaccccctcctctgccctgggctcctgccgctacaagctggcggatcccgacgtagatgataccgattaccagcgtatcctggagatcttcaagaagtacaatgtccgctatttcttctacaacggcggcaacgactccatggacacctgcaacaagatctccaagtatatgcagaaagtgggctacgagtgccgcatcatgggtgttccaaagaccatcgacaatgacctgaacggcaccgaccactgccccggctttgcctccgcggccaagtatatcgccacctcctgcgccgaggtgtggcaggacgcccacgtgtatgacaccggcatggtcaccatcatcgagatcatgggccgccacgccggctggctggccggctccgccgccctggcctccctcaccggctgcggtcccgacctggtctatctgcccgagaccgactttgacatggaccggttcctctccgatgtgaaggccgtctacgataagaccggcaagtgcatggtagccgtgtccgagggcatccactacgccgacggcaccttcgtctccgaggctaagacctccgctactgacggcttcggacacgcccagctgggcggtctggcctccatgctggccgagaccgtgaagcagaagctgggggccaaggtccgcggcatcgagctctccctgctccagcgctgcgggtcccatctggcctccaagaccgatgtggaggaggcatatctggccggccaggctgcggtggaggccgccgctgagggctttactgacaagatggtggctttccagtgcactcgggatggcagctatgaatgcaagaccgtcctggagcccctggatatcgtggccaactttgagaagaaggtcccccgcgcgtggatcaacgaggccgggaacggtgtgactcaagagttcatcgactatgtgctgcccctgatccagggagagaccgatgcccccaaggagaacgccctcccccgttttgcccgcctgaaaaaggtgctgaccaccagcctgtaataggtttccagtaaagaagccctgcatggcattgccatgcagggcttctttctatctcgctgaatcaggccatatgccgcgccagaaaggcgtccaccgcgggccagtacagctccggcgccacggcggcggactccgcgtgagcggcgccggggacggccagcttctccttctcgcaggaggcggcctgatacagctcctccagcatccagaaaggaacaaaggtgtcctcctctccgtggatgaagagcgtgggggtgacagagcgctccacctgtctcagggcactggcctctgtgatgctgtagccggcccggatacggcagaccagatccgcagcgttgagaacggggaagggcggcaggccgaacagctccttcagctggccagaaaattcatcccagacagaggtataaccgcagtcctcgatcacacaccggacctggacaggcagatccgcctcaccggaggccatcatcacggtggcagcgcccatagagacgccgtaaagcacgatctccgcctccgggtcctccgcgatcagctgttgacaccatcggaccacatcccggcgctccggccaccccatcccgatgtagtctccctcgctctctccgtgccctctggcgtcggggagcagcaccgtgtagcccaaatcaaacagatgtttgccataggaggccatgccggtggcgttgttttgatagccatggcagaggacagcgtagcggtgagggacgcttccgtccacccggtaggcgtggagctccaggccgtcatcactgatgagggacacgtcacggctgtccttcagcagccagcgggtgtactcgctgtccacgatcccggcggcggagccgaagccgcccttggcgttagggtccagggcaaaggtgtagaaatagtttcccacaaggatcagggcacccagtgccagcaggatcaaaaggaagacgatcaccagggccgccctgaggccgcaaatcgctgttttattcacagggggtcactcctttggcctggagagaggcccggtccgtcccagatactcctgggtctccaccgggagcttccgcttccccagcccatagcgtaccagacggttgaccacgctgtaaaacatggcaaagaccgggacacccagcaccatgccggcgaatccaaacagcccgccgaacagcaggatcgagaacagcacccagaagctggccagtcccgtggagtcccccaggatcttggggcccagaatattcccgtcaaactgctggagcacaaggataaagatcacgaaataaacacactggataggactgatgatgaggatcagcagggcgcatggaatggcaccgataaaggggccaaaaaaggggatgacattggtcacaccgatgatgaccgccaaaagggcggggtatgggaagttaaagagattgcagcacaccagcgcgatgatcccaatgatgagggagtccagcagcttgccgttgataaagccgctcatgatgcgataggcattgcgcacctcctccacgatcaggtctgcccagcgggtctcacacacactgtacacgatctttttggcctgggcagagaagatatcctttctggccagcagatagacggagacgataacggcgatcagcaggtccttggccagcatcagcagggcgatgaacacagcggacacactggagaacatggaggtgagccggggaacgatctcctgctggaaccaggacaaagagctgttgacggactccagattggggagcagatcggactggagccactcctccaccgacacagctaccgagttgtagtaaggcatgaccgctgtctgaatgtccgggttattggccaaaaattccatcagccgctcctggagggtcataaaatagccggggatggactggaccagccctaccacgctctcatagacctggggcaggaccatggccagcaggatataaatgactagggcggcgaacagaaggctgaggatgatggccactgcgttgagaaagctcaggttccgccggtctgacaggcggctgtccggggtgagtccggtgagaaatcttaaaatggcccggtggatgggcagcaacaggaaagccaggaccgctccgtagtagatgggacggagaatgcggttgaccgtggagagaaagctcaggatgcccttgaagtgaaagacggcaaaaaagacgaggatagcggcggcgatgaccagaaatgcagtcacgccggcaaaaaagtatggattttgcggcttcttgttcacgtgggcagctcctttttctcagactttcagctctgtgtcctcatccttcaggcagtcctgatatttggccagagcgggggcgacctgctccttcaggaactcctccacctgctgggggcagcggccgatgtagcggctgggctccagatgggcggtgagctcctcccggctcataccaaaggccgggtcctctgcgatcagatcgatcagattgttgggcaggcccaggtcctttacattccgcccggcctcctgggagagcacgcggatacgctcgtggagctcctggcggttgccgcctcgcttcaccgcatccatcatgatgttctcgctggccatgaagggcagctcctccagaacgtggcgctcaatgaccttgggatggaccaccagaccggaggccacgttcaggtagatgttcaggatggcgtccacagccaggaaggcctctggcacagacaggcgcttgttggcggaatcatccagggtgcgctcgaaccactgggtcgcggtggtgacagcggggttgcccgcgtccaccatgacgtaacgggccagggagcagatacgctcgcagcgcatggggttgcgcttgtagggcatggcggaggagccgatctggttcttttcaaagggctcctccacctccttcaggtggcagagcagccgcatgtcggtggcaaacttgctggcggactgagcgatgccggacagggtggacaccacgttgtagtccatcttccgggaataggtctggccgctcaccgggaccacggcgtcaaagcccatctcacgggctatcttccgctccagctccttgaccttctcgtgatccccctcgaacagctccaggaaggatgcctgggtaccggtggtccccttggagcccagcagcttcagggtggagatgcggtgctccacctcctccagatccatgagcagctcgttcatccacagggtggcccgtttgcctaccgtcaccagctgggcagcctgaaaatgagtaaagcccagggtgggcagggccttatactcctctgcgaacttggccagccgggcgatgacctttaccagcttggcccggaccagctccagtccctcccgcatgaggatcacgtcggtattgtcccccacatagcagctggtggcccccagatggatgatgggcatggctttggggcacagctcaccgtaggtgtggacatgggccatcacgtcatggcgcagcttccgttcccactgggccgccttctcatagtcgatatcagtgatatgggactccagttcatccacctgctcctgggtcaccgggagccccagctccatctcggcccgggccagcgcgacccacagacgtctccaagtggagaatttcttgtcagcggaaaagagatacagcatctcgtcgctggcatatcgggaggacagcggactttcataggcgttggtcggcatttgcatcaaacctcattttatttagaatctgggcagctctcccctgcccgcttgtatcaaatattataacgtactccccgggggattgccagtgctttcccaaattttcacgaaaacttaagagaggaaagcgggagcgcggacatgggtctgtccgtgctcccgctctgtttcgtcatgtttagatggtctcgcccttcaggaaacgctccagccggttcaggccctccttgatgttctcaatggaggtggcataggaccagcgaacaaaagtgggggcaccaaagccagtaccgggcaccacagccaccttgccgtacttcaggaagaggttgccgaaatcgtccgcgtcccggatgaccacgccgtggagctcctggccgatgagcttctcgatgttcatcatcacatagaaagcgccgtggggcttgatgcagctgacgccctcgatgctgttcatccgctccaccatgtagtcacggcggcgctcgaaagccttgcgcatgacctccacactctcctgggaggcagtgagggcggtcacagcggccttctgggagatggagctgggggagccggtgcagtggctgaggtagttggcgatcaccttggagacctggtcgttagcggccacatagccgatgcgccagccggtcatggcataggacttggaaacaccattgaccagcagggtgcgttccttgatctccgggctgatggaggcaaggctgacgaactcctctccatcatacaccagatgataatagatctcgtcgcagatcacgtaaatatcctgttctacgcagaccttggcgatctcctccagctccttgcggctgtacatcatgccggtggggttggatgggttgttcaggatcatggccttggtcttgggggtgatggcgtcccgcagctcctgggcggtgagcttgaaatggtccgcctcccgggtctccacaataacaggcacgccgccggtcatcttgatgagctcagagtagctcacccagtagggagagggcaggatgacctcgtccccggggttgatgagggccctcagggccacatagacgcagggcttggcgccgttggacacggagatctgctggggggtgtactccacgccgcagtcggccttcaggcgctggcagatggccttgcgcagctccaccgtgccgctggagggagtgtagcgggtctcgttgtgctcgatggcggcaatacccgcctctttgatatagtccggcgtattgaagtcgggttctccggctccaaacccgatcacgtcctgcccctcggctttcatctgcttgaacagagtgtcgatggccatggtgctggacggctcaacagccagtgcgatcttggaaagctctttcatatcaatgttgtcctccttctggcgaatcacgcatggcatattatatgcgccgacttgcaggattgcaagtggtttccggttattttcctgaaattctgaacaatttggcaggggacggtgcaagtcaggggtagagctccctccattctgtgctttttcaccaaattctcctctgccctgttcccactcccgttcctccagagggcaaaaggacccggggcccccctcccggatctggcttgggggtcccgggtctgtgtgttttctctgagtcagagcttttcccggatgcgccggcccatctcccgggtcccgatggggatgacgccgggctcggcgatgtcggcggtgcgccagccctcagccagcaccgcgtccacggcgttttcgatggcctgggcctccgcggccaggtggaaggagtagcggaacatcatggccacagacaggatggtggcgatggggttggccttgtcctggccggcgatgtccggagcggagccgtggatgggctcatacaggccgggggcggcgtccccgatagaggcggagggcagcaggccgatggagccggtgaccatggaggcctcgtcggagaggatgtccccgaacatgttctcggtgaccaccacgtcgaactggccggggtcccggacgagctgcatggcgcagttgtccaccagcacgtcctcataggacacgtcggagtattcctccgccagccggtgcatcaccttccgccacaggcggctggtctccagcacgttggccttgtccacgctggacaccttgttccggcgcaggcgggccagctcaaaggcccggcggccgatgcgctcgatctcctgctctgagtaggccatcaggtcggtggcctcctcccccctgtcctcagtctgatagcggtcccgcttgccgaagtagatgccgccggtgagctcccggaccatcatcaggtcgatgcctttctcggcggtctccttcttcagggggcaggcgccggccatggcgggacgcagggcggcggggcgcaggttggcgtacagccccaggtcctttcggatggccagcagggccgtctccgggcgctgttccgctggcttgtcgctgccccacttgggaccgcctacggcgcccagcagcaccgcgtcgcaggccctgcacttctccgcggtgccttcggggtaggacacccccactgcgtcagtggcgcagccgcccatcaaaatgtcctcaaaggtaaagctgtggccgaacttcttccccacggcttccatgacctggaccgcctcacccactacctctgggccgatgccgtcgccccggatcagcgcgatcttgtagttcatttcgccaccccccggtccttcagggagttgagcaggccgccgcttttgataattccgtcaataaactccgggaagggggccgcctggtaggtcttgccggtggtctcatcggtgatgacaccagtggcaaaatccacctccacctggtccccggcctggatctcctccgccgcttgggcgcactccataatggggaagccaatgttgatggcgttgcggtagaagatgcgggcaaaggagggggcgatgacgcacttcacaccgcaggacttgatggccagaggggcgtgctcacggctggagccgcagccaaagttaggaccggccacgatgatgtcgccgggctggacggtggaagcgaagtccttatcgatgtcctccatgcagtgggaggccagggccgcgggagaggggtcgttcaggtgccgggcggggatgatgacgtcagtgtccacgttggcaccgtatttgtaaaccttcattggttcgtcgatcctttcaaattaagaattaggaatgaggagttcgggaccttatattccccattgcgcctgaggcgccgttcgctttagatgcgggggtcggccacgcagccggccactgcagaggcggcggccacggcgggagaggccaggatgacttccgactgcacatgccccatgcggcccacaaagttgcggttggtggtggagacgcagcgctccccctccgccatgacgcccatgtgtccacccaggcaggggccgcaggtgggggcggagacagcgcagccggaggcgatgaagatctccagcagcccctccttcatggcttggagggtgatctcctgggtggcggggatgacgatgcagcgcacattttccgccacctttttccccttcagaatagcagcggcctcccgcaggtcctggatgcgcccattggtgcaggagccgatcaccacctggtcgatgtgcaggccggccacctcgctgaccaccttggtgttctcggggagatggggcatggagacggtgggttccagcttgtccagatcgatgactacctcccgtgtgtagaccgcatcgggatcggcctcaaaggcctcgcagggacggcccacccggccgttgatatactccatggtcttctcgtctacggggaagattccgttcttgccgccggcctcgatggccatgttggagatggtgaagcggtcgtccatggacagggaggacacgccctccccggcgaactccagggactgatacagggcaccgtccaccccgatctcgccgatcaggtgcaggatcacatccttgccgctgacgcagggctggagcttccccttcagggtcaccttgatggcagaggggaccttgaaccacagcaggccggtggccatgcccgcagccatgtcggtggagccgatgccggtggagaaggcacccagcgcgccgtaggtgcaggtatgggagtcggcccccacgatgacctctcccggggcggccagccccttctcggggatcagggcgtgctctacgcccacctggcccacgtcgtagaaatgggtgatgctgtgcttatgggcaaactcccgtgcctgcttgcacagctgggcagacttgatatccttgcagggggtatagtggtccagcacaatggcgatcctgtccttgtcaaagacctgggtgaagccagccttctcaaactccgtgatggccacaggggtggtgatatcgttgcccaggaccaggttcagcctggcttcgatcagctggcccggctggactgaggacagcccggcggcctttgccagaattttttgtgtcatcgtcattcccatggaatgtgcctcctcacttttgtgggtgattttttcctgtccagtatgacggttctcttgccaaaagaatgttaactatgatacaattaagaggatttcttgggaaaagaggagagatcgatggaatacgccaacaccttttcgctggacttccctgtggagctctggcgtcccttcgcccaggaccgcccctcggtccgctgctcctccggctatctgatctacctccaggggacagaggccacctgcttttattatttgaaaaagggaaaggtaaagagcttcatccagtcggaggacggggcggagcgcaccctgaacctgtatcagcagggctccatcttcggggaggcatccttttttgacgaactgccccgggtgtcctccgccgtagccctcaccccctgcgagatcgtccccatcgaccgggagcaggtcacggcggaatttacccggaatccaggcatggccatggccatgctgaaatatctggcccggacggtgcggctgctgtccgcccatgtggacgacatggccttccgcccggcagagtggcgggtggctcagtacctgctctccgcagcatctgggcaggatcaggtgtcctgcacccaggaggagatcgcctcatccatctctgttagccgggtgaccgtcagccgcatcctgaaccaattctcccgcagggggctggtcgctctgggataccggagcatttctcttttggaccgcaggactctggaaacgctctgcacaccctaaagctggagcggcgcatttctgatgcgccgctccagctttttaggtctctaatgtatccataagctgcagaagctgctccagctccggctgacagccatagtcctctaagtcccaggggtccagcttctcacagagcagcgcacgccccagctgccgggccgtgtccggatcacgcggcgttccgatccccagagcataacatcgaatcaggcggcagcggcagttgacgtttcccttttccgcacccgcctggtagagcgcaaacgcctgcttcgggtcctgctctactccaattccgatctcataaaaacgccccagtgcccaaaaggcagcctcatccccggactgctgggcctgtcggtagcagtccagcgcctctgcgatgcggcccgcctgttctgcatgccagcccatgttatagagcgcacagacactccctgcctccgctgcacgctgataccaaaacatagcctgttcgaaatttcggggccctccccttccatttgccagcatctccgccaaattgttcatgctggaggcattccccttctctgccgcacaccggtaatattcgactgccctggcgtaatcctgttctgtcccgatgccgtattcataagaccagcccaaaagccccaaggagtcggcatcccccacttcggcggacttgtgaaaccagatcaacgcctgcttcaggtcctctgcaactccaatgccgccctgacagcaccggcccagttcatacatggatcggacggaaccccgctctgctccctgcctgtaccagcttaccgcagctgccgggtctttttccacaccttttcccttttcatagcaccagcccagatttcccatcgcaacagtatttccggcctgtgccgcccgccgataccactccacggcctgcttccagtcctggggaacaccgtgtccacgctcatagcaccaccccaggttgcacatggcgttgtcctgctcttgttccgcagcccttcgcagccagatgactgcctgcttgtcatccttcccaatgccgctgccgtggaggagccggtatccaaagctgctcatagagcgggggttgcccgcttccgcgcctctgcgatacagctctgttgcctggacctggtcctgctctaccccgatcccttcagaatagcaccaggccagatttcccatggcgcggatgctgcccgcctccattgcacggcggtacaaagctgcggcctttttcccgtcctgatccacgccctgccctgtctcatacagccaccccaggcagcggctggcttccgcgtctccggcctcagatgcctgttcataccagtgcgcggcaagagggaggctggcctctacgccctccccatgctcatagtcccaggccaggcagtacatggaacgtacgtctccagactcggctccacgctggaaccaccgggcggcttcggcgtggtcctgctccacgccttttccgttgtcatagcaccaagccaggttgcccatggcccggccgctcccggcctcggcgctccgcagataccactccgccgccttctcccagctctgctccacgccctggcccgcctcatagagccagcccaggttgcacatagcatcgctgtcccctccgtccgcagagcggcggtaccagtaggcggcctgagcatagtcctgtccgatcccccggcccttctcacagcaccatcccagatcatactgggccgtggagtcccccttctgagcccccagggtccaccagcggaccgcctcctggtcattctgagggaccccatcccccttcaggcacatctgtcccagctcgcaggccgcagactcggcccccagctcccatgcccggaccaacaggtcccaggcccggtctgggtcccggggcatcccggtcccattgaggcagcagatccccagaagcagagcggcccggctgtgcccctgctccgccgcctgcgaatagagctggaccgcgccgtccgcgtcctgctccacccattttccgtgttccatcagccagcccagacagcactgtccgtccgcatcccctgcctgagccgcacggcggtaccactgtacggcctgcttgggggagatctccgtcccgatgccaaactcatagtgccgggccagctccgcctggctggaggcgtccccctgaagggcggaggtccgcagccattccagggcagccttttggtcctggggcagtcccagcccctgttccagacagcgggccagcagcctctgcccccgggaggagccgtgctccgccgctcgccggaacagctccaccgcctttttctggtctgaagtggtgccgatcccctgctcatagcagacgcccagattgcacaccgccgacaggctccccatctccacggcctgctgataaagccagaaagcctggcgggggtcggcctccactccgagcccctgttccatacagatgcccaggttgcaggtcccccagccgcttcccattccggcggagcggcggaagcaggccagtcccctctctttcctatcgggccggctgatccagaagacaccaagggcggaccagtcatctccggtcatctccccctccgccgcctggagcatccgcttgccgcagcggggacagaactccggcagccggggcccctctccaaaatagccgcacccctggtctgaacagcgaaaaatcatactgctctcctttctctggccagcctactccaggccctgctccaaaattcgatagatggcctccatgtccaagctccgccgcagcatgtcagccagccggtcatactgccgttccttaaaggtacgggcgtcctcggtgcaggactgttctccgttccactccacccccttctcatccaggagcagatccaccagcccgcaggtgaacgcaccgctgtcaaacagtccgtggagataggtcccaagcacccggccctccacggtgaagatgctctctcccccgctggtccccatatggatctcatagccctccagaggacaccccctgagccgtccataaaatccgtcaggtagatccgcttgacaacacttctgttctctagactttttacgagaaaaggtggtggccaccggcaggagtcccatcccatgcatggagccgcctccctccacgccctgggggtcctccagagtgcggcccagcatctggaatccgccgcagatcccgataactgggacaccctttcccaccagccggaggatcgtcccctccagcccgctctgccgaagccaggacaggtcggccagggtgctcttcgtacctgggaggatgaccagatccggccttcccagtgcctggaccctgtccacatagcgcagtcctaccgccggatggcgctccagaggggcgaaatcggtgaagttggagatgcgtggcaggcggatcaccgccacgtccaggggcttcccctcccgtctagcagaaaagtgctgggagaggctgtcctcttcatccagatccagctccatccagggcaccacccctaccaccggcacatgggtcagctcctccagctgggtcagaccggggcggaggatctccacgtcgccccggaatttgttgatgatagtccccttcaccatagcccgctcatcaggctccagcagggccatggtcccgtaaagggcagcaaagacaccgccccggtcgatgtcacccgccagcagcacaggcgcccccgccatccgggccatccccatattcacgatgtcctccgccttcaggttgatctctgcggggctgccggccccctccagtacgacgatatcgtgggtctgggccagggcgtggtaggactccagaatagtgggaatcagctgctttttgtaggacaagtaggcagcggcggacatgctgcccaccacctccccgttgacgatcacctggctccccacatcgctggtgggcttgagcaggacgggattcatccgcacagagggctccacgccggccgcctccgcctgcatcacctgggcccgccccatctccagtccctcccgggtgatgaaactgttcagcgccatattctggctcttgaagggagccacagagtacccgtcctgccggaagatacggcacagccccgccgccagaacgctctttcccgcattggacatggtcccttggatcataatggatctagccatggaaagcctccctctcctgctgaatggcctggatcagcctctgattttccccgcggctcctgacgcagacgcggtagaagccaggacccagcccctggaagtcggcgcagctccggatcaggatgccccggtccagcaggcgctcccgccagccctcctccccctggaacagcaggaaattggagtcgcttgggtagacgtggaaccgcagcctgctcagttcctgagagagatagcagcgctcctcctccaactgctggtggacgcgaaatggccagtccggcgcattctgtaaagcagatatccctgcctgttgtgccagctgtgacaccggccagggcgggccctcctccgccatagcggccagcagcgtccggtcatcggacaggcagtagcccagccgcagcccggccatggcatagctcttggtcagggcccgcagcagcagcagccctccgccctccagctcccgaaccagccggtccggctcccctggagacaactccagaaagcactggtccaccaccagcagtgctccggcctcccggcagcgggccagaagggcccgcaacagctggtgagagatcagtgtgcctgtggggttgttgggatcacagaggaacacagcatcaatttcctgggaaatttttccgagcagagcgctggaaaagcggaaatcttcgtgcatatttgcgtaatggaatttaactttacaattatttttgtacagggccctgtggtactccgaaaaggtcggggccaggaccagggcgtggtccggacgcagggctcggaccagccggtcgatcaggtcagaggccccgttcccacacagcacccagtcctctggaacgccgtcccgggcggagatggcccgccttaggccacggcagagggggtcaggataggcgggagagcgctccagcgcctcccgcgccgcctggatggcgcagggcggcacccccaaggggttcaggctgatggacagatccagcacagaccgctccagtccatagatgtcgccaccgtgggtcctctcctccatttcgctccctcctatctgaatatgtgagaacacagcactgccgctgcggcgcacagggccagacacaggacctcggtcccgtacatcagtcggttggccgtcgggatgtcctccggccggatgggccgctccacctccccgatggtgggctttcggaccagcgtcccaaaatagctggcatccccggccagctggacccccagcgccccggcacaggccgcctccgtctgagcggagttgggggacttgtgcttacgccggtccctgcgccagatccgcagtgcgtcccgcccccggaatccaggcagcagagcggcggccaggcacatgagcagggcggacagccgggctggcaaataattggccgcgtcgtcggtgcgggccgcagccctgccgaaaaagaggtatcgctcgtttcggtatcccaccatggagtccatggtattgacagctttgtacaccatgcctaggggcagcccgcccagagccagccagaacaggggagcgatcacgccgtcagaggtgttttctgccaccgtctccactgcggcccgggtcacgccgtcccggtccaggcactgggtatcccgtcctacaatgcggccaaccgccctctgcgcgtccatgaggctcctgccggtcagggcccgatacaccgccatactctcatcccggaggcaccgggcggccagcagctgatagctgagccagacctccgccgcagtccccgccgccggagagagggcatatagagcggccaggagcagcaggctcccccctccgaagagcaggaccatggtcagcaccagcaccccgccagccagcagttctcctcccggcgtcctgggaaaaagccgccgcaggccggtctccaggcggctgatggtccatcccatcagccgtatggggtggggcatccacgccgggtcccccaggagccagtccagcgcggcagcggccagaaggacccacaggcggctcacagcgtctcaatcagggtgaaggccatgtcctccccctcctccacccggaccagatatccgccgcagttgctgggcagccagctgtaaaaatcctgatgtggcaccgcaaagccggacatagcggacatcagggtcccgccgtgggccagaatcccgggccgggacatgcccagggcacgggcctgctccaccacatgggccacccctcggcggcagcgggcgatgtgctcccccagcacctctcctccgggaaaggcgatgtgggggtcccccgccagccacgcctgatagatggggtcgtccttcagctctgcccaagtcttgccctcaaaggttccgaaatcgcactccttcagcgcgtccaccagccgctgctccacgccgggaaacaggatctcagccgtctgccggcaccggagcataggtgagacccacagcccatcgatgggaggcatctccccccggcggcgctccgccagcgccacgccctccggggccagggggtggtcctgggagcctacatactgccgcagcagattccctctggtggagctgtggcggatcatcagcaattccatgtctattcctctctgtctgttctattttagtcttatagccagcccgcaggagatccggtacaccgcctcggccctctccgccagctggcagcagaggcggcccaccgcctcccgccgctgccgttcctccgcctggatggggaccaggccgcagcccacctcgttgcagatcactgcccgcagtcccatcagctcctccagatccgggagggggtccagcgcatggaggtcgtagagcacctgtgtcccaggccccaggaccggggacagctcctcctcccggacccccaactcacgccgggcgaagtcccgttttcctgccccaaggccgcccacgatcaggatcatatcaacacctccgctatctctctcgccaacaccatcgccgccagacagcccaattcgcacacctgaaggaaccaccccgccaggtcacccgtcagaccgccgaactcccgacgggccatttggatataccagagatagacgaggatggcggcggccacagcggcgcagcccacccccagcatcccgatggccagcgccagcagagcgcacagaaacagcaaaaaccgctgccgccccctcccctgctcctgctccgtaaaggcggccagcaggccgtccgccctggcccccggctgggtcagcgccccgtaccccgacatggcccgggagagcacggggaccagagccagtacccacagatcctccttctcccagcccggctggcaccacagggcgtattgcaggaggagataggacacacagcccagcaccgcgaaggcccccacgcgggagtccttcaggatctccagcttccgggcccggtcctggtgggaggccagcgcatcacaggtgtcgcagaagccgtccatatggataccaccggtgtaggccagcggcaggaggaccgcccccgctgcccggagctgcggcgtcagcgtcagcagatccgccagcgcggaccaggccagcaggagcagacctaggacagcccccacaaggggaaacgcgcacaaaacccaggcccggcagtcgtcggaccaccggacccagggcatgggaagacgggagtacatggagaaggccatagagaccgcccgcagatacctcaacagcactcctccttccagattaccggcagtccgcagaccacctctattacccggccgcaccgccctgcagccagccggtgcaggcgggccagcccgtccagatagaccgccgtctcgggagaacaggggacctcctctccgaacacatcggcgctcaccatcaccaggttctgggcctggacgctgagccgctccaacccctccgccgtccggagcagggccccatccgggtcgaagcccgaaggggagaacagctcattggcccatagattgcccagatcctccagcagcacgctgctccccaccgggatggtcagcccgcccaggtcccgcgggcactccagggtggagaagcccttgttctgccgcagggcccggtggcgccggacccgcgcccggctctcctcatccatcgcctccatggtggccagatagatccgaggcccctcaccggacagcgcacacagaagatcttccgcgtaccggctcttaccgctggccgcgccgccgtacaccagtgcctccatctcagctctggcggcgatagggcgggatgcccaggccctggaaggtggccatgtcccgatagatggacatggccatatccagcatgggcatgatggtcacggcgccggtcccctctcccagcttcaggtccgccgaaacaatagggcgcagccccagggcgtccaggagcaggccgctggagggctccgctgacctgtggctggcgatgagggccttggccgcgtccgggcagagccgcacagccagcagggcggccgcggcggagatggcgccgtccagtaccacaggcacatggtggagggcggcccccagataaaagcccgccataccggcgatatccagccctcccaccttggagagcacatccagcgggtcccgggggtcaggggcgttgacttcgatggccctgcggatcacggcgatcttccgctccagcccttcatctgacaggccggcgccccggcccgtcacctcctccacccgccgccccagcagcactgctgtcacggcggcggcggtggtggtgttgccgatgcccatctcccctgccgccaacaggcgatatcccctgcccttgagctcctctgccagcgtgatgccggtgaccactgcggccaccgcctcgtcccgtgtcatggcagggcccttggcgatgctcctggtcccacgggtcacgtggcggcgcagcaggccgccctcctccaccgggtgggcgatcccgatgtccaccgggaacacctgtgctccagcggtccaggccatgcggcagacacaggcctccccccaggccatggaggccgccacagaggccgtcacctccggcccggtctgggtgaccccctcctcagtcacaccgttatctgcgcagaagacggccagcgcctttctgtccagactgacatccgcggtcccctggactccggcggcccggatcaccgcctcctccagcaggcccaggcccccgatgggcttggcgatggagtcccagcggcgggccgcctccgccatagccccctgatccgccggcgtgatgccggagatcgcgatactcaatacgctggtcgtcataatgctccctcctgaaatcgcccgcacgccgccacgaaccgggacgcaaaggccggatttgaccgaaaatacaggtgcggaaatcccgcgaacagggctccctcacaccggacacagagccacgcttcgcctgtcacaggcttttgcgcccggcaggccgttccgttgtccccactgtcccagcggtggaactcgtgggctgcgatggtctccccccgaggaagataaggggtgtcctgctccgccgtcagggagatatagccgaagcggccggttccggatgcccgtttccccctgccggacaggacccccgccatgggccagaagacaccgttttcatcctccagctcttcctggagatagagaaaaccgccgcactccgccagcactggcatcccggcgcgggctgccgcacagatctccgcccgcagagacttgttccagctcagctgccgggcatacagctccggatagcctccgcccagatacaggccctttgtcccggaaggcaggtgccggctggtcagggggctgaactccaccagctccgcccccagctcctccagcagttctaggttatcctcgtaataaaaggagaaagcccggtcccgtgctacggcgatgggtatcccgccgccgctccggggcctcgctgtctccagcgatgcagtcaaagggggggctgaagccgcaatggcgaacagggtgtccaggtccacgctctcctccatctggccggccagacgcaggatcttctcctgaagcccctctacctcggccgccgtgatgaggcccaggtggcggctggccagcgcacagtccggcatccgcgggatatgccccaaaacctgcaggccggtctccctctccaaaatgggtgtgagatggcggcagagcttcggggagcactgattcaggatgacgccctgtatcatgtcgggcgcccggaatgaccgcagcccctgcaaaacagcagccaatgtgagggaggtgccccctggaacgacggtgagaacgaccggcgtatccgtagccctggccaggtgccagctgctggcccgttccgttccggcgatcccgtcataaaagcccatgcagccctccagaacggccaggccatggcccgcaccggcacgggccatcagcccccgcaccgtgggctcgtccgaaaaaaacaagtcgagattgcggctgggcagactcagcacctcccggtggaagagagggtcaatatagtccgggccgcatttgaaggcacaggggtccactccccggttcagggcggcctggagcagcgcgcaggtcagagatgtcttcccgctggagctggcaggggccgccaccatcactctggggagcgatacggtctgatgttccatggatcaagttcctcccagtgggttcctcggattctcattatagcggctctccagacaaaatgcaatctgagaatccagacattcctgccctttccaggcccgatccagaaagctcctcgaaaaaaagagggcgatccgccgcggacatgctctgggacgcctgtgtcccgccggggccgccgctctccccacggcataggatggtgcggaggagcaatcctccaatccacacaaggaggaatcctgcattgaacaaagaaacttgcagcgcggccggatcggccagctgcccggactatttcggcacactcccctcttgtgccgggctggctgtcccctatgtcccctttcagcagaatgggtctcaaaaatattctcagggggatgccctgagtaacggtacgctgtttcccggtctgaatctgcccttccatctgaaagtggaaggcagcacccttccctccaatccgctggtagagctccaggcactggagttcgtggtgctcgagctgggcatctatctggatacccatccggatgacatggaggcattccagctgttccagcagtatgctgccatggaaaagtccgccaaggcggcctatgaaaagcggttcgggccgctgatgaaaagcacggcggccacggaggacacctaccgttggctccaggacccatggccctggaactaccagcagaatgaggtgaagtgacatgtttatttatgaaaaaaagctccagttcccggtaaagatcgccacgcctaatcccaaactcgccgcttttattatcagtcagtacggcggtcccgacggggagctgggcgcttccatgcgctatctgtcccagcgctactctatgccttatgccgaggcaaagggactgctcaccgacatcggtactgaggaactgggccatatggagatggtggctgccatcgtccatcagctgacccggaacctcactgacgaggaggtacggaactccccgtcctttgccccctattttgtagaccacaccaccggcgtctatcccacggcagcttcgggctttccctggagcgccggctctatccagtccacgggcgacgtcatcgctgaccttacagaggacctggcagcagatggtgcaatggcgtaaggccaacatctcttaaaatgtatcaaactccctgattccacttttttgtgcggaatcagggagtttttattccatatcataacagtttagaccgcagatgtggcatttacacctcagttaatcccgtctctgacaaaagaagatcccaatttttctggatcacatcacgattttccattacagtctcggccgtacgatcccgcattgcctctttggccatactgcaggaccgtcgaatcaattcaaaccactgtgacagatttagggcacaggggttgccacagttagggggcaacaaaaacttcaccgcatttccgctgctcccaacgatatcagaaataaacagcattttttctcgcttcaactttgcatttagtttctgacgctcttgctctgccaccggcaagaaaagttcatctggtgttctggtcagagaaagataggcatcgatcaacaggttctttatggcaaccggtaccgctgtggaaaccaaatgccgcagatcatatccatccagatacattcgctccgcaattttagccagtgaatcgtcccttcccccggcagtaaagaattgagtgagacaaaaaccaggtactggaattccccttgctgtacatacatccgagataatgtgccctatataatagaatacagccagatacttttcctgttcgggtacttctttcggcgagaggagcacccgaagacgaccttcctcatcaatacacgttgtggtcccgcacagaatatctgccacggcaaaaaagagtccccaaaaggggtcatgggcaaaacttctcagcctgtgattattaggattcattacccccttttggagagacagatcatacggcaccttacagacatcggaaaaccattgaaggattggaatcaactctccatctgccgtttttccgatttttcggagcgcggcggtcagcaaactcccatcaaaacgttctccgccccgataaatctttaccacttccggagtccccacaaaaatcacatcgatcacaatcgatgcaattccggccaaggaggcaatcacatattcttcactccggagttttggaaatactctgtccgtatgggaaaagtcacagattgcctggtctatatatacatctatttctgacgtctggccgtcagaaagctctggcaagcggatctctgctcctgtttcttccgccaattgattgattcccacaatcagtgcattgattgtctcccgttcctcccgcctctctttctccaggtcagtgcaggctttttttgtctgatctacatcggattggatgagggacaaatctttttgaaactgaatgatcgatttttccttggagtcctcatagctgtgatcattcttctccttcatattccgcccctatctcataagaagacttaaaaactgccatgtcttggtacgatttttgcaaatagttcaatgtttttttcatattttttatggtatctttcttttcttcgtcttccttcttcaacttctctatttctctctgcaatttatgaatttctcgacgcaggttctccatcacggcctgggcactctgcacatccttttgtgcattgagaataatttctttcaagacaacttccagcttagcggcctgactcagcgcaaaagagggcatggactttgccagtatgctcactgtcgatactgccgctccgccgcccgcagccccaagaagcgctcctccaccaacaattgccacaacgccgcctaccgcaattgcaccgcctcccgccattgccagacaggccgatgtcaacgccgctccggtcacccccgcaaagttagacccaaacagcgcaacagcaacaggtcccgcaaatatgcctgcggtagcagccgcggcggccgaaattgccacaaccgataccgcccccagcgccactttctgcattttgcctgaaagcttattgatggtcttttgatacgtctttttgaatcggtctacaaaaaccggatccatcaggccagaggacttagccagactttttagaaacgccgtctgatcggagtaatgcagtttctgatagtgcttatccgcgtcttttgtctctcccagcggcgtatatgcacgaaaaagcgttccttcgagcataatgagatagaaccatgtctgattgatactgctacttgcctcattcgcgacggtgtccagtagttcctcataagtgtagaaagtaatctcatcgtccatcgtagcctgaagacaggcggaccaatgctccagccaatgttctttgtaaataatatctttctggttggagttgatgtccctctttgtcaacagatattccaacgaatacaagatcttgatctgctgtttggtgagaccaaacatttcaactgtgctgcgtacttcattttccataattctcgactcctctttctatttttataggatttcaacgaatgctccctggcttttcatccacatatcgatcccctttccaaatacctctgcccggatctcatacgttccgtcccgctcgccgacgatctccgctgtgggcagccggtctaggacagcctccaccgacggccctttatacagaaaatggactgttcgcagcctccctccgtacatgaattggacccgctttcgaaattccccctctgaaaagcgctgaccatatgggacggtgaagtgttccgattgtacctggatctgttccagacggtccacccgataaatggtaggataggggtcctccggatattcaaattcctgatttcggtccacatttttcaaaaatgccgccaaataaaagtagaactcagagcacatcaggcccactggttggagccggcggtgcttcttttctcctgtctgagttcgataatccgcctggatctctgagcggctttgaatggcctgccccagggtccatagaatgtctaccagcggttttccgtggcggggctccacataaaaatggcgctcgttggaaataatctcctggagcttttcccgctccggcggccgcataccatgaaccaggagtttatccagaatctgatccatctcccgctttgacagcgaccggctttccaagagaatcttgcaaactgccagcatttctccacaagagagaaacgcgccctcaccctcggacagccggtagcagttctgccccagatcatagtgaatctccaaaggcggggtctgctccgcaaaaaagttccgaagctgttcaatatcccgctgaatgctgcgctcagacacgccaaagacttgcgcggcctcttttttctgaatgctcccccggttgaccaactgatcatacagagataggaggcggaatcctttttcctctgccatttctctccccccttctccattataccgaccgggttagacggaaactgtccatgagaagaaaaaagctcctgtttcttatccctaattctaccctaaaagttcctccatttcaacacttaaagtttatttataacaggaactctccggaataaactgaataaaactactggggggcacaatatggactggacggcaatcggaagcagaatacgaaagcagcgggaatatcttggctacaccagagaacagtttgccgaactgctagaggtcacaccgaaattttgttcggacattgaactcggtgtcaaagggatgtctgttccgaccctctgcaaaatatcttccacgctccgcctgaccacagattatattctatttggcagagcagaggtccaggccgacgatccgatctctcttctcctccatagttgtacaaatacagagcgggagtatgccgaaagtctgctgaaaacctttcttttggccatgaatacaaaaaaagattcgccttagccggcgaatctttttgctttccgataaaacgtgctgggtgacaagttcagctttctcatggcctctgctgctgttagctctcccgcccgccaccgccgtatcactgcgtccagacctggcggctcaatgggttttcgccccttgtatcggccctgaccttttgcagccgcgattccctctcgctgccgctggaggatgtattcccgttccagttccgccaccgcaccaaagacggtcagcataaactttccagtgggtgtcgtagtgtcgatcgcctccttttgggatatgaactccactcctttgcctgtaaggcgctctaccaattcgagcagatcgcgggtgttccgagcaaaccggctgatcgactcgacaataacggtatccccccttcgcacatactccatcattttctgcagttccggtctctgtgcatttttcccactggcccgatcgatgtagagctcatccacgcccaggcgttccatcagaatctcctggcgaatcgtattctgctcttgtgtgctcactctgatatagccaattctcattgttcattccctttctcttgtcaagtttacagttctttggtataccaaaattgattcacaacgatgaggtgctgctatatgaagcctcttgatcgtgatacccacatcctggagcatattgtctcctattgtcagcagattgaagagaccgttgcccgttttggcaacgatggctctattttttcctcagatcctatttatcgaaacgcagccgctctctgtatcctgcagagaaggtttgaatatttctcaaaagggtcggtttccaaattgtcacatgccaaatctcagaaaccgacccttttgagatacataatccgtgtgccactagggtatgccctattggcacacggttttggtttattcaggtaggatcagcagacttccgctgatgttcaggaactgctctggtcgctggaagatgctcatatatctctgaatctgttcctcagtcagggaagcaaagctgtccccggccagtccgcacacaaagaaagggccggcgatcatatcatagaccgtcccatcttccgttcgcagggctcgattcaggggcagcttcagcagctttccttcctcgtgacacacaagggcggcagaatcctgaaagggataaactgcttggattgggccgcccaccacctgctgcattgccttcagaccctgtgagatttctcttacagagggcacttttcctggctccaccactagaattttcatgcgctttttctcaccataattctctgccatatagagcatcctccaactcttcgggcgtaaatccttcctggtacagctgatcaatgtcctccggtgtgtatccaaaggcggcagccactgacttgatttcctccaggtaagggtccgcttcttccgtcttttctccaaacctgcgccaactgctgtacggataccatcccggccatcgccaggaggaaaacaatttactgtcgtcaaactctccgtaggagatatgtccgtcctcatcgattttcaaaatccctccgctctgaattgagaccggcatcggttttccaaacggcagacgcagacgccgcagcacccggttcagaatctcctcagtagacgcatacaggtaaagtcccacacttgggtagtggtagagacacatggggttgtcccccttgatgaagtacagctcattcttaggccccagcagcgtgacggtgtaggagccctccagctgttcagccatccaccggaggctgtcaaagttcagcgctccctcccgctccaggagctggaccgccacatagctgtccgtctctatcctggtcctgggcagccgcagctttttccgcagcgaccggtcgttctggatcaccccgttgtgggccagagcaaaggggccctccttgacacggcccagaaatgggtggttgttgtagttacgtttttcacttccctgggtagtcatgcgggtgtgccccatcaccacccaggcatccccgggaatcctccaatgcatggcatgggcgggccgtggacgcttgtagatgtggagctgtccccggctgtggtaggcgattccggcggcatccgttccccgtacctcgcaagctgtggagagaatggtgagaatccggtttctctcccctttggacaggctgtggccgtagtcgatcagaccgaataggcagcacatgttacagctcctcctctccatttaccggctcattcacatataggcggcgttctttcaaatactgcaccaactccggggtctgacagccagagacaaaagtggtctaggacatagccttcagctcctcgtcagacagaaaaatcgccacatcgcagattcgttcaatgagctgcaatgtggcgatcaaggtgttgtattttaaggtaccccggaaaatccgaaacttgatggtactgtcgttctggagattgacacaggtatagcggcttctattggcccccttcttggcgtggtccaggatgtccttgggatattctttgtagccgtatcgggccgcccagtgctccagctggcgcggtgtccggcggctgaacttcagcagttcctcccagtgcttctcaaagaagtagagcacccgggcaatggcgctatcctgctcctgatgggtctcaccgaaggcggcgcggctcacatggacatggagcccgcaggtcccgacctgatggctccggtaccccatggagaccgcctcccgcaggatctcactccagggcatgttcttctggtggaactccagggccatgggatgggtcacgatctcaaatccgtcattcaaagagccgtcgtgcttacagtagaccagttcccgatccccgttggccaagtccagaatctcctgggcattctcgctgcactctcccgctccatcaatctccagctccaccccaaaataacgggggcctttgccgtaaaagatcgggtcaggcttgtagtagtaatcctggatagccttgtggtcagcggagcgggagtaacagtcgcggcacaggggctcctcgttgcccacatcgtcccaggcgtagaagacgcgggcgttaggaatcagcgctccacagcgggtgcagttggtatagagccgctcatagtagctttggcagaggggcgtatcggagtcaccggcgttgttgtcgctccagattcgttctccgcagacggaacaggtttccgtctcttgctccaggcagtccgggcagaggtcctggtcgtcgaactcccgccgctggtccagatcgtactcaccgccgcagacgacacatgtaaaagtttctcctgtcatggttcttcgtcctcctgcttgatcacatagtcgatggccgcgcacagcagggctgccgcagccgccagaagaaccccgagcagtttctctcgggcctcctggcggtcatcctgattcaccccacggtggtgcagacttgccggaacagttgattcaccagttccacgatgacggcgcgaatgacggataaaagcgttttcagcatggtttccctctcctttccaacgtaaaatgaaaaaagccggaagctgtgatcgaggcgtaaacctcagcagtttccggctttctattgaaatgatatatttttgaaggggacaggaaaagcaaacagggtgcaacaggggaataatacaaaaagggggaattcatatgtaccgtgattcactcgactacgcccaggaccggttcacaaacgtcctggaatcctgcgccgtccttactccggctgaagtaatggaagttcttggaattgggaaaaatagtgtctatacactcttgaattccgggaagctccgtggatttcggattggaagaagctggaggatttcagcagaggcactggaggaattcattgcaaaataaatcgctaaatcgactgatatttttaaaaaatattatttaatagatttagtgcgtataatcagtctcgtttcaaccacctttatcaaaaaaacgcgccggcattctcttcaggaagtgccggcgcgttttttcttatttagccgtgaacccgagcggtaagagcttgtgtcttgctccatcttctgcagtgcaacgtgcacgattttatgagccaaaaatttctccgacaaaatttgggcgcggattttcaggacggatactttttcagaactccccaccttggttcgaatctcaaaagagcggcgggtctgattgtctcgctgtactgtctccagaaaacctgccttctccatcaacagttcccagctccgttttgtaagtttttgatcttctgcaaacagattttttagctcaggaaaataggaattttttagcaagaacattcgttccctcgggtcgtaccagaggcaaacagtttccctatcactacctttcccacgaacacgggcatatcgattttcggaaatcagttttttcaagtatgcctctaggacatcccgaactggaaactccggctggaactgctgccactctctcaggagtgcacgttccaactgtgcgagcataggtcctcgctcctccttcggagcgcacaaccgtaagaaatgccgatatgctgccaaaagataagtaacctttttctgcgattccacatccaggtcgtatttttttacatcctccactacgtcctcgtaaaggtgtttgagcgtatgccgttctaccgaaacttctctctgagcagcccggatttttttataggcctgccggaaaagatgacggaactcttcctccaggtgatttatttgagcgattcgatcagattccccgtctcttgtttcatctctggcatcctcgacatctgtaaaaacaagctcctccagtgattctgatcgtaatatctcaggctttcgataccaatcctcaggggtatcacctgagaaggcaaaatcgtgcctatcggctgccgccatgagatcatgaacgagacgctcaatgattttggatgacttttgggagacaatcttttgcatggccgtccagttgtcgatggacctaccgcacagcttcactgtgaagtacgccaaaagcggctgcaaaaagggctctgcagggaattttgctgccgctgggatggtaagagacaggcacaacttttgggccgagacttccacagaaggttttctgcccacccacaatacaccggccttctgaaggatcttcgcctcaaattcggacatcgaaatatccttacgtaccattttctctgtggcttgaaagatctttaccccatctacaatctggaaacgcggcggaagtttagggacgatatcacagcacaactttgccagctgggttgctttgtccaggtccatgcaggaaacacaaattgcaagctgttcagaaaaatgtttttttacttgcagatacggcgtcgaccggtccagtcgatggaactggggaaaaaacggcttcaggaccgagaacaacgtaaagcccagcagtatggctgcaatatcccctgcattcgattgaagcaaacttttgaggcggttccatgcctgatccttcgcttcggtcaattcgggtcctaatattgtatacggacatcctaaatagtaggcgattccctcctttgtaaactgccagactggaatgggccccattccccaacaccgaaccagaaaattattgaagagaactttgttaatccgcgctacctgctgttttggaaagggaaaaaccggaactcctatactgcctgactggtgttctgtgctgcacctaagaatccgaccggatctatcagtttcgatcaaagagaggcgtgtatttgaggccccatttaacgtccagctctccgccaaaatatatcgaaacttgagggcttccggcgccatggaatactttctgcattcaatatcgattggtttaaggaaccaaatactctttttctcttcttgatgttttttggggggattcttaaaccatttgacgcgctgtttgccccgtttgttatgatacgaacatttgcagatacaaatactggagaccgcattcgccaaatatgagctcttggaggatggccggtaaagagtaatattgtttcgggagaggcgaatcaaaagttctttgccgcaatcttcccaaaaactttccgccagctctctgtcttcttgcgatatgggcgtcaccacgtctcctgcacctcctttgccctcttaggtttcctagggcttataaaaaattataccagcccaacacagtccataacgggttccccagggaatgctcactgcacagaaatattgcgggcattccccgcttgcggaaatcgtaccaaacaaggagtgaaatgaactcacaatgaaaaaaagaaaaccaatcctggtctatcttacatcggatgaactgcaacacatcaccgaatcggccaagaatgttgggatggatcgctctgcttatatccggcaccggtgcctccatgagaatcccaatcaggagtccatcagccgcaacctagcgcagctcctctgcgacttggcgaacacggcacaggagctggactgtggcaaggagcttctggggcgactcagcagcttggaggaactgctttggcaatctatcgggtaatccatcggccagaaaaataccacgattggaatgcgatccgagatttacttcaatatgtcacctctcccaaaaaggcaaagaacggacttatctttggcggagctctctttccgaacattgcagcatactctatggagggactctgccgggcgttcgataagacagagggacttctgctccggcactcgattctcagcttctccccagaagagaggatcgatgcctgggacgcagcggacatcgcaacccgagccatccgctattacgaacagcagtaccagatcttagcagctgtacatgaagacagacctcatattcatatccatttcgtgatgaacaccctcaactaccgcacagggaagaagtatcccggagatcgagctgattactatggcttcctggcataccttggtaaaattttaaaaccctatggactaaaggtcaagctagaaaaataatcaaatatcatcctattagagaaacagcaatcataaaatgactgagaaaggagcacaccctttatgaatcgacttcctctccctaccccatcctgccggagcgtattccggaaatccgagactcccctgacggcggaacgatacaccaagatctggatccagctgatcaaccagatggagcgctccagctccatcgctgcagggctccagtaacagccacaaaagcggtctcttgacgagcattgtcagggggccgcattttttataggagcgatgtccaatgtccaaagccgcaatctactgccgtctgtcggaagaagaccggaataaggcctccgccgaggacgacagtgccagcatacaaaaccagaagtccatgcttctacagtacgccatacagcagggctgggaagtatttcacatttacagcgacgatgactacacaggttctgaccgaaaccgtccggagtttagccgccttctagcggatgctcaggcccataaatttgatatcatcctctgcaaaactcagtcccgctttacccgtgagctggaactggtagaaaaatacatacacggtcttttcccgctgtggggaatccgtttcgtcagcattgtggacaatgcggataccgacaacaaggggaacaaaaaatcccgccagatcaatggtctggtaaacgaatggtatctggaggacatgtccgacaatattcgcagcgtcctcaccaatcgccgggaacagggctttcatattggcgccttcgccctctacggataccagaaggacccggctcagaagggccatctgatcattgacccagaggccgccgcagtcgtgcgccgggtctttaccttgttttcacaaggatacggaaaaacggccatcgcccgaattctgaatgaggatgggatccccaatcccaccgagtataagcgccagaaaggattgcggtaccaatctccccctggaaaaacaggaacgctgtggaaatatcctgccatctcccacatgctgaccaatgagatctacatcggcaacatggtccaggggcggtacggcagtgtatcttataaaagcaaacagaacaagccccgccccaaagatcagtggatccgggtcgaacacactcacgaggcaatcatcgaccaggacctatgggagcgggttcaggccttaataaacgaaaagacaaaaccctttacaggtgggtcgattgggctctttgccaaaaaggttcgctgcgccaattgcggatacactatgcgctccacgaaaaaccgcgggcggcactatctccagtgctccaaccggcgcgtttcaaaagaggcctgtaccggcgcatttatttccgtggaaaagctggaacgcatcgtggtccaggaattgaaccggctttccgcgcagtatttggatcaagataagctggaacgaaacctggagttttccagctctctcctggctcaaagacagaaggtgctggatcaacgttccaaatatcaggcacagcatgaggagttccagacgggcctgcgagagctctatctggataaggtacggggaattctgtccgagtcggattttctcagtctctcccaggacttctccaaggaaaaggaactgctcgagggaaaaatcgcggaaaccaaccgtcggctggaagaactggacgcccggattgccgccggggacaaccgccgggaactggtccagcgttacactaatctggagcacctgacccgtgaaatggtggaggccctcattgactatattttagtgggaaaacgccagcctggcgaaaatgatccgccggttgaaatacattggaatttctaaattagagataaatattcgcctaggaaaagaaactcatgtttcttttcctaggcttttaatcaaacgattttctcgcttcatggagacccacataacaatactcatctatcctcttcttccagaagttgaagttcaaagggaaattcgaaacattcttccgcttctgtatttctatatacctcctctgataccgtgatcagctgaattccttcaaaatcgtttacctttcttttgggatcgccagaaactttcatttcaaacccctgctcgttaggggcagaaaaaaccataactgctcctgccgcagagtcagtttcacatatccgcttccacaagagatcccgaatcctggaattgacccttccgacaaataccccaggtttcaactctagaaaccaccgagtcagttctccacgcacgctctccggagcagaatccattgcaatcactgtcatagaaggtccctttccgcagcatagttttttcctccgttgattgtatcctggcggtcatcccacagggagcctacagttggaccgttgaccatttcttcctctactgtctcctggaaaatccattccagatcttgagcaattcgagacaagatacgtgcatttgcaaaatatgcccggcaagttagtcgaatccgctttttttgcggctcaccctgtttcattttctggattgcttcaaatgcagccggaatggttgtctccgctttatataaatctgcaacgtcatatacaaacgagagctgctttcctgtatgaataaatcccagtcctggtgagtagcccaatgaaacaatagcagcatggcacagaccatagagcagagcattagcctcagacagcgcttgattgactgggtctgcctgatcccactcctctgttttgtacgaacgttttttccagcgaactccagttgtcctcgctgctagttcataggccttccgaacccgaattccttccattccccgcagttgttgtaacgtcaatccctccgtttttaagttcgaaaaccgaatctgatacatcctttttgccacttccagatgccgctctgcgtccatacatgcttttgcctggaccaacagattcttcgcacttctagtctcccctactcccgcagcataaaaccgctcggcatgttctccacaccaaatcgccatacatccgttattacaaatcgcccgaatcgctgcatgggtcacactggttcccggtcctagcaacaagcatgtcatgccggcaattgggatgggtgtccgcccctgcttctgaattgctacaatcgcagtgtcgttctgctcaatgacagcatgttctaaatataaataactgatgctgtctttcaatttaggcaattcctgtaagttcttcaacaatattccctccctgcattgaaaatcttcagtttccagacgacggatagacgtgcccactcttcacatgcgtggggtttactcaatatagagtggcaggtcaccggcactgatcggtccatctccacgtacgtgaggtttacgtcatggataatgtctatcttgatacgtattacggtccatccccacacatgtggggtttactcctccatgttgcagtcacgggcagcgttctgcggtccatccccacgtgcgcggggtttacggcctgctcaaaggtggtcttgtcatccaccatcagtccatccccacgcacgtagggtttacgatcccgaatggccatgcaggctgcggcaagaccggtccatccccacatgcgtggggtttacgagggattcaagctagacgacaccccccactacggttcatccccacgtgcgtggggtttaccgttgagtaacgccgagatatgttgcgattgccggtccatccccacatacgtggggtttacgtcgaagaaccgccgcaccgccagccaccgatccggtccatccccacatacgtggggtttactgcttcgccggaagcgtccactcgacccgggccggtccatccccacatacgtggggtttacgtcgaagaaccgccgcaccgccagccaccgatccggtccatccccacatacgtggggtttactgcttcgccggaagcgtccactcgacccgggccggtccatccccacatacgtggggtttactctggagccgcccctctaccacagcctgctggccggtccatccccacatacgtggggtttactcattgatctgatctaccagctcctccatgtccggtccatccccacatacgtggggtttacctcaagtgagagccgcgtgaccaaaatcccatcggtccatccccacatacgtggggtttacaagagggttcttggtgatattggttgcgcccccggtccatccccacatacgtggggtttacttctcgattccctacagagggaatcacaataacggtccatccccacatacgtggggtttacggcaaaggatgtgggcacaaacggacaaatgaccggtccatccccacatacgtggggtttacgccacccgcgcagatgtaaacgaggccattgccggtccatccccacatacgtggggtttacggagtccatcggcaagaccaggacggaggcgggcggtccatccccacatacgtggggtttacactgaaataaaatcaaaaatttcgcgcgcaagcagtaaaacagcacttttaccagcggaaaaattcaaaattttatttctagtaaaaatcaagagctcagcagcagcattccaagtccatacgattttccgggaccaattccctcccggactgcattttgaaatagcactgcatctgtaatttggagcgttccctgatagtgatattgatccagatacatccggccgccccgcgctggcacatgacggccagtcagctggctgccctccaactcctgacaactcagtagccgaaacccattctgctctcctttcctggttagccatgtacagcgttcttccagagtcctgagaatccggcgctggctgtttttcccgttcttctgcgccaccttttttgtaggcgatgccagcagatcaaatctccaaatctgcccctcctgcatggcattcagccagggcgtcagatcccgctccccagaaaaatgcatacccggcaacaggcgttcccgattcgcaggccgattggaatagagatagattgccagtgcgtacctgtcctcacggacccgatagattacgcccgagcttttccgatcactctcaaaaagccccataatcatttgatgaagctgctggcagtcgcccaatgcctgccggataccacgctgctgaggaatcaagtcaattttcgtcagatacatcttgtccctccctggtgataacccctcgatagacggttcgaaggccaaactctcgtccccctgagagtctttcgtcaggccgggtaaaactccccaccccgtctcctggaatctcacattcatagtacaacgcctgcggagcggatttgtctcccttccgcatacagaccgggtagcgctggatcgcatccaataagtcggagtatgcctctgtcactccttcaaacacaggtcgggatgggacacagctctttcgtcccaggtagatgggccacaccggctgcttcagagccgctgtcacccgctcccgccaatcatccggcagatccagcaccaccaaaaaactggcgtcctggagataccagcgaggtgagatgaccgtgttgcttgaccggggcttcccctccgcgttataaagcggatacccctgtaccgtgtggaaatccagcacacggatcccggggcgatccacccgcaccgccatatgtagggctgcggacagagctgcaatctccggatctccccgctctaatcccatagcgcacgacaaaagacctacaacgccggatttgcttggaaaatccccactgtcccggacgtcccatttagagtggtccccccaggactgcagcgccccttccagccgcaggatcagcaaagttttcttttcttccatcacattcgcctcacgccagagcagccgccacctgttcgatcaattctgtcagtgtcttgcacaccgtagtctcacattctggtacgatagagcatgctgtgggacagaaccacagccgttgtttcacgtttaatccaaaactgttctgtatcgtgtcaacttgactagccagcgcctgaacactgcccttcaccaaatcgtagtcattggccagctccggtttaatcggccgcacaaaggcgttgaccatactgaccggcaccttctcctccttgcattccacaaggatcgcactgggaagcacgtttccagcaaagctgttctgtttccctgatgggttggtcaacgccatagtacggatcaacgcagggatggccgctttcaccaactgctctgcatccggcgtatccttcaggtttttcatcaaaatatccgtatccagagaggcatagatgtagtagcatgcggagttgtaatcggtatccccgatcatggcggaccctttttcctctatcacctccccggagagcagatcatccatggcggtgaaatagtcggattccatgttcatcttattggtagagatagcatgggccacctgcatggcggcttccacatcccggaacgcattggaagtcaccattctcccaaagagtgccatgtccagtgtgacagggcggctctccgctccctttaccgcctcctgcagatcctttgccttcaatgccttgacctctttcagggatggacaatccttgagcttttcataaatagcttccgccaccgcctggatatcttccggcgcatagaacacaatctgtgcggtgtagctgccatccttattctctgcgccgtctttgttgccaaatccactgattttggggaatacagtgtcaatatactcttgactgactcccatctccgccagcttctctgccaccagttggggcagcttacgggttcgaatgcccagatgttccgctccgatggtctgagagaacagcggcgaacgcctccagctccgcttcaagcactggctggacacacggccccgggtcgttccgccaaacatacaggactttggagcgccagactcatcccggttcagattgactgggggatagttcttgagcatatggatttcgtataacatggatcattctcctttcaattcttcttgctgctcttcaggcttaatataaagggcgcgagcccacttccgctgcacgctctgtttttcaccgttccaatagaatagatcttccaatagccactgacagtccactgcatatccttttgatctcacaaaccggatcagtctggacagctttttgagcataaatccatcctcgtcccactggatatccagaagcatttccaatcggtggccggtgctctcggacatctctttattccgaccaagttgatagaagatctgctccaaaggctggcggcgtttctcatctgtatcccagagacagtacagacaagctgccgcaaatgctcgctcctcctgccactgcggtatggagaaaggcaggcactgaaagaaaacacgcatggcctgtccatccgcctgactcagcatggtcccagcttcccgcttcagagacgcacgctctcctctcggcaaggtatctagccgctggaagaaactgctccaatccacttccttcatatcttcatccccttcttgattgccgcgatttcttttccaagcactttttgctgataatccataacctggagcatagctcttccacacagggtcagctgttccaaggtccaatctacacattccgctgctgtcctgcattgccagctgatggccgctgtcagattggcagcataatcaaatccaggctgtgccaacgcatcaaactggctccacagtatctgctcgcaaaccgcgtagtacctctgtctggcctgaacacggctctcctccgggatctcctccagagtcagcgctttataaagcgcccggcccaaccgctccgcttgcgcgacaaactcggtaataaagcgcaacgcgttctcattccccagtaactttttgggaatttgaaggtcgtgcctctgtgccctcatatagtttgcctgattggtctgaactccgtaaatcacaagagacatcggacgatccgaggtatccaatttttcatactgcgctatgatctggggagcacgctttcctttcgtgtcaatcagatccgttaggttgcgccagatcgcttcatccgcagatggcttccagttaaatcgtccctttgcattgtatcggtatgtaacatgcgggtctgtccaagaatctgtcacttcaaagttcattccttggctgaaatatacgttttcaacgtattcaccagactcatctgaaattagatggatccgccttgctgggaaaaacataccaaacagccatgatgtcctcgccactttttgtttggataccacttcatccggattacgccacaagaccggaggccgatcaaggggcagatcaattcgatccacctcgatcataccaaacactaaagtctgaaacaggttctttccccggatcagtgtaaaccatggcggagcgccgttcatattagagggatacccctgcgcccctgcggtacaaaaaatctgcgcagccaacatcatccgcagcgctttgccgggcgtgtaagtgatcttctcccgcttgtgatcgaaatggatgtggttgttcccatttgggatagagtaatccaatgtggagaccggttttggatctcgatcccaatctgcacgatatcgggtctgtaaaaatggccgctctgaatcgaagaggtcaaagctcaccccctcctgttcacactggcgcacatagcgctggatagtatcccaatcaaattgcccctcatccaataactcctccaatacttcctcatcctctggtcgaagcatgtccatgagaaacacgatcagaaagcggtaaacactgtactctaccataggagatggatcctgaatttcgctgagcaggtgggccctctccagcgtttccagcaggctaagctctttcatgcttccgtccagctcttttactgggatccacggctgcgttaaaatttgaaatgacgccttcacacacctcaccccttctcaaaaaatatacccaactctttgtctgcaacgatttgggttccatcagcttgagtataccgcatatttccattttcatctactgtggcagtataaatttcgatcccctccagcagtcttctgccgaagatcacgccttccgttccgtgccgcagaagttttgcccgaacagagacactggccttcaggatctcacgcgcctcttctctggtcacatctgatagacacagtcggtctccacaatgctgacttttgctgcgtaaagatccaaaccgctccggcggcaaaagtacaatacgtacggtcggttcacccaagcgcgtcttggccgagaggtagctgctgctttccagatcgtcaaattgaatccgttcagcttctttgatcggggtgtatcccttttcaggggcattgatcagataacctccgccggccgccgctttaacctgatcttccattaggtgatctatccagagatccaattcctccggtggagccgcttctgggctgtagccttgctccaccaatgtgggcagatcctctggaatctgtatttcactgcgttcttccaacagatgaatactctgcttcagaagacactctgggtaaatatagccgtccgcctcaaattttcctgtctcatcaggaatcagcacatagaaccgtggggcagcaagatgaggcggccggggcgtatcttcatggcgaaactcccgtccaaggcgctggagcagaaggtcaattggcgcgatcgaagtcatcataacgtcaaaatccacatccagagactgctccaccacctgagtggccactagaatagccttctgcgggcgagctgccttttcttttccaaagagacggatacagcgctgttcgatttgatcccgctggccaatcggaaaacgcgcatggaataaaagcaattctccatcaaattctttggttttgagcgcttggtaggtctcctgggcttgctggacggtattgagcaaaatacagaggcatccaccgtctttcaccagtcccatcgccttctcggcaatctgttccgcatgatgcagcaccgggcaaagctcgacggatactgtctgtcgtttttccgtccggctgaccggccgcacgattacattccctgactctgttacagcagtaatcgaaggatagcatggctggattggatgatcggtataggcagacaacatttgcgcctttttctccggcggaagagtggcagacaacaggaccacagggatctccagggctttacaccattctagcagccgatggaggatctcactcatatagacatcgtaggagtggagctcatcgatcaccaaagttttctctgccaatcccagcagccgcaaaacgccgtatttcaccagcaagacagacatcattgcctgatccaccgtgccaaccgcataggaactcaataaccctcgacgcactggaagaagccagctcgaggcatagcgctcctcctctgtctcgaatttaggccaggattgggtattgtctccgtcaaccagccaggccatactgtgaaggagacggactgagtctggaaactgatgcagctttaataaagtccgcatacgtccaaccatctgattggaggtagctgctgtaggcaaaccaacatagaaaccacttttcccccactgtttggccattcgaatccctgcatagattccggcctccgtttttccctcccccataggtgcctccaacagtaccacagaaatgcgctcctgtgcctgttgaaaaagggcctcagtttctgattgcaagccccgcattacatctcttggaatattgggccacacatcatgaaattcatttccaaagtctgcggcctgcgatgtcagtccgctcagcatcaaaaatttttccgcaagacattttgcgtgctcctccccatccggctgattgatccagagttctgcttgggcaaaatagttactggatgcaatccagtccgacaggatcacaattccaagcagcagcgcacctacacttcctctgttttctttcccaagagggggtaaaaataattcctcagagcgtaaaaatcgaagccgcatccagtgctcgaattcttcctgaagatgattccaaaagagatcttgccggtccccttccgttccgcttttcccttggtgatgcacttctagaatatccgcatagaatttagctgcgctttgattcgaggcttccttccagaggcgttcccgcagacaacgccaggtagttttctcatgacggatctggtttaaagcaggaaagtctggttttacaccctctttatccatactttccttcataggcaaccagcgatattgaaattgcccttctatcttacccacatcatgaagggatacaaggtatccaatccagtctgtaaatttctctggagtgcacgataataacgccaacaatttatttcgtacgcctgggacaatcatcttatgaacgatgacttgtgcgacaatcccagaaatgaaggaatgggtcagaatggattgaaaaggttctgtcttcgcccatatctgttgtaaaccaatgctcataggaatacctcctctcacttatattgaaatcattttacattcaaatctgtccaataaatgagactcaggaaaattttttatttctgtgattttgagtataacattatttgaacgctgtttgtacaataaagattactgcctctaagaaagttgcccttacaccattgcagcagagcagaaagcccgcctcacctatgacaatatcctgcgtctcagtgatgacccggatgtgaacaacgtgatccgcttcctgcgggagcgggagatcgtccacttccagcgcttcggcgagtgtctgcggctgtgcaaggaaaagatgaacagcaagaatgtctatctcaccaaccccgcattcgacaaacagatgacgccccagccccggaatgcctgagtgtcccggagtctgctatcaaaaagtgcaaaaaagcctgcggtctgatggaccgcaggcttttttgtgggttcagacccggatcagctcataggtccggctgcccaggccgatcttttccccatgggccaagcagctctcccactcgcactccggcgtcacattccggaagtggtcgtggagatcatggaagccttcctcatgcatccggtcatccagaaggctgcctgggatgggctgctgccgcaaacaggcatccacgcacgcctggtccagggccaccgggtcaaacgaagcgaacatccccacatcaggcaggatggccatatcgttgtccccatggcagtcgcagtagggagatacatcgatcaccaggctgatgtggaactggggccgtccatccaccaccgccttggcgtattcggccatcttccggttcagctgctcacaggcacagtcgttggggttaaaaatggcatcaaagttacacaccgcgatgcaccgcccgcagcccacgcacttttcctggtcaataaatgccttacccccatcgtaggagatagcgtcctgcccgcactgcttgatgcactggcggcagcctgcgcagcgcttctgcttcaccaccggctttccgccggagtgctgctccatcttgccccggcggctcccgcaccccatgccaatatttttcagcgcaccgccgaacccggtctgctcatggcccttgaagtggctcaggctgatgaacacatctgcgtccatgatggcgcggccgatcttagccttctccacatactcgccccccgccaccgggacctctacgtcatcattgccccgcaggccgtctccaatgatgacctgacagccggtggagaagggggaaaacccgttctcataggcgctctcaatgtgctccagggcatttttccgcctccccgggtagagggtgttgcagtccgtcagaaagggaacgccgcccagctccttcaccacatccgccaccgccttggcgtagttaggccgcagataagtcaggttcccgggttctccgaagtggagcttgatggccaccagctttttttccatgtcgatctcaccgatcccagcgctgcggatcagccgctgaagcttggtgagctggcttgtccccacaggggcccggaggtccgtaaagtaaactttcgatttgttcatagatctcacatctcctcacatgcatcgattgcatcgatcaaaactcagttggacggcatctgttgtttggcgcgtctgatctccagtatcccggggatgatattggcaaacgagcccgccaggatcagcaggatacccgccagcatattgcccgggatctcctccccgtggaccatccaggccagtatgggcgagagcgccggcttgaagaaatacaccagcgagaccacgctggccggctggtattccatagccaggaagtaggcgcagaagcccacgccggccacgccggccgagacatagagcacatagggcaggttctggagggtatagccctccagaatggggatctgggcaaaggagggcagaccgatggactggaagaatcccgccacggcggggatatgggtgatcaggataaagcagaaaatgatgacgctcccgaagaggaagctgaagcaggtgaccaccgcgcccccgtactccgcacactttcgtttgcccatcaccccgtagatggagaacagcacagtggagcacagggccagtcctacgcccaccatgttcagcttgatatgcagggggttgataatggccagggtccccaggatctccagactcagggctgccagatggcgcctcttgatgggctccttcaggatcatgaaggcaaaaaaggtaacaaagactgggttgcagctgaacaggaccgccaccacggaggactcggtaaagttgatggacatctgatagatcggcatgcagatggcaatgccgatcaggcccagcagggcgaaataggccacgcttttccggtccaggcgcttgcttcgcttctttagggtgtagacagccaccggggccagaaaaacgaagccgatggaaaagcgggccagcgtcagctggaccggattgacctcccccgcgatgagtttcagcaccacctccatggaactgaacgcgatagttgcaatcaggataaaaaaatatccttttttcatgttaagtgtctccccttacaggctcatgtaagtttgttttttgattatagcacagcaggccctgaaaaggaaccaaaactcagagcagacaccgaaacggctggaccaggagcgatgtgatgggataaagtgcatgcttccagtctccgttatcccagggggtcaccccttccttctccacataggtctccagtccggacaccagcagagaatcctcctccatttccgctaggtaatgttccaagaccgcattaaattcctccccatggatcacgaacatcacttccgtatccacataggtgctgcgcatatccagattgtaggagcctaccgccgcgaggtcctggtcaatgagcagggactttccgtgggaggagtaatccccgtaccactcccatacctgagcaccggtatccagcacccgagccttattgcggtaatagtcggaagaggccataaaattgtcccctactcccatggagttgatctgaacggagaagggcaccccgcgcccagccacccgtgaaagtccgtcatacatcgactgatcacatactgcgtagggtgtttggaggtagactctctcctcagcaccctccatcagctgctgcagctgccaccataccagaggttcttttgccaaaatattgatcgggttatggataaaagtcacagcttttaatgggaccgtggcctctatgtaatctgtattctctttgctcaaaagctccggatgagcctccctccatgcgctgtgccgcatatggagggcttctgtctccagaagtacgctctttcgatagaaaaatggtgcggactccagccaggttttgctgtggctgtcagaccaaaccatctgaaagtactgctccacctgatggagtacgctctcaccgctgtcagccgtccctgcggcagaattatagaacagaatatccaggtcatgactcttttccgggtccgggacatagtcccctaaaaacttatcaaaagtgtttcgtccgcctgccagcagcagccggtcatctgagagaatatatttgtcatggagcctgccgttaaaggtccagggcatgagcggattgggcgtattatagaaacggatctcaatattgggatgtgcgcccagggcataaaacaccggcgaggaggccatgctgaccaggccgttcatcccatccgtgaggacctggacctggaccccgcgctccgctgccgccaggagggccgctgccacatccctgccgctctcacaatcccggatatcaaaattggtgaaaatcagccgcttctgcgcctcttcaatcatgcggatccggatctccagtgcggcaacattgtcatctatcagggctgcacgatccacgcttccagtcccataaaatccacttttgtcaaatcctctctgaaattcttttgacactcccggctggaacagaaatgggagccacattcccaggagcagatagaccgcataacacagaaaaaccactggcagaatccgcagtataaggtgtacatgccggccaccagctccccctgctttgataaataaatgtttcatcttatctgtaaacctccgggctttgttatgagagcagacgctttcattctctatttttcattattatagaacgaaacgacttttttctcaaggggatatgatcggaacccacacaggctttcgatcgcactgtccctcagaagcggacggcggaccgtctgccccctgctggcctccaatgagctgacagccgggtattctctatcagaatacccggctgcctctgacttttcacatctttacgcggtggaacaccttttttccttttttgagcatcaggccgtcgcctgccatctggtcggcagtgtaggatgcggccacgtcggtgaccttctccccgtccacctccacgccgccctgttccaccaggcggcgggcctccttcttggagggagccagcttgcacttcatcatcaggtccaggatgccgatggagccgccggccaagtcctcctgggacagctgggtggccgggacattgctcatgtctccgccgcccacaaagagggccttggcggcctcctgggccttctcagcctcctccttgccgtggaccagagcggtcagctcataggccaggatctccttggcggtgttcagctggctgccctcccacttgtccatctcgtcgatctgctccaggggcaggaacgtgagcatgcgcaggcacttgagcacgtcgccgtcgcctacgttgcgccagtactgatagaactcataggggctggtcttggtggggtccagccacaccgcgcccttggctgtcttgcccatcttcttgccctcggagttgagcagcagggtgatggtcatggcgtgggcgtccttgcccagctttctccggatcagctcagtgccgcccagcatgttggaccactgatcgtcgccgccgaactgcatgttgcatccgtagtgctggaacaggtagtagaagtcgtaggactgcatgatcatatagttgaactccaggaaggagagtcccttctccatccgctgctcatagcacttggcccgaagcatgttgttcaccgagaagcaggctcccacatcccgcagcagctcgatatagttcagtttcagcagccagtcggcgttgtttaccatctgggccttgccctcaccaaactcgatgaaccgctccatctgctttttgaagcagtcgcagttgtgctggatggtctccggggtcatcatgttccgcatgtcggtgcggccggaggggtccccaatatagccggtgccgccgccgatgagtgcgatgggccggttgcccgccatctgaaggcgcttcatcaggcacagggccatgaagtggcccacatggagggagtcggcagtggggtcaaagccgatgtagaacaccgccttcccctcattcaccatcttggagatctcctcctcgttggtcacctgggcgatcagtccgcgggctttcagttcctcataacaggtcatcgtactttctcctttttattcaatattctgctggcatgaagtgttttcagcaggactgttgtttctctccctgagcaggcacgcgctccttgtgctccctgcgtccacagatcacattgtaggccaccacgctgcccaccacgatcaccgcgcccaccagcgcagtgggaccgatcatttcatggtaaaagacggctaccaggatggggttgaggaccggctcgatgccggagaccaggctggccgtcaccggcggagtggtcttcaggccgatggtgagcaggatataggccagtgccacctggaacacccccaggatcaggacgctgaccaccgctgtggcggagaagtcggtctccatggccacaaagggcagtcccaccaccgcgctgaatacatctccccagaagaccgagctgatggcgtccccctccggcatgtcgttcatcatgaacacaccggcgtaggagatcccggagatgagggccagcacgttccccaccatcccgccagcggaaaggctgtccacaaagaagaacaggatgccgcccagcacggccgcgcaggtcaccagatccagctttcccggcctgcgccggaagaagatggcggtgaacaccatcacgaagatgggggcggtgaactggaggacgatggcgttggccgccgtggtcatcttgttggcgatggagaagaggatgttggtcccacacaccgccaaagcgcccagcaggacccagcggttcatcctgggcttgtggcggatggcccacaggtacagcccgataactaccaaggccaccgcggtcctggctccgttgatggacatcccgttccacgggatcactttgatgcagagccccccgatgctgtacagcaccgcggcggcaaagacgcacaggacgcctctctgctttgcggacacgacaccgcccccttttctgtctctctccacatttccagaccgcccgaactcattttgcggagtctcccccgctgttcccgcccctgcggcgcgggaatacacagagaggatcgggctctctgaaaaatgccccctgtcccgaaggacagagggcatgaaatgcggtaccacctctggaccgtcctgtcctcgcgggcaggaccttatggagtgctggactccggcgcggtaacgggcgcggcccggcctgtcccctactgcggcttgtccggttcgggcggctgctcggaggcgtattcccggagcgcccctctccccctctcaccgtccgggggttctctgggcagcggcggctccgctactggtcctcttcattgcaatgtgtgcaatatagcacacgccgttttctttgtcaaggggcgggcagggatttccggacagatctgggtccgggcggctgccccggcccttgtcactcggaccggcccatggtacaatagcaccgccccccggcggggtccgggggggcggatcaacagataagtggtgatatctcatgcatcagatcctcatcgtggaggacgaccctgccctcagccagggcatccgcctggcactgggccaggaagggcgccagttcgtccaggccggcaccatcggccaggcggagcgggagctggcggagcggacctttgacctgctcatcctggacctgaacctgcccgacgggaacggcctggacctgctctcccggctgcgggaccgctccgccctgccggtgctgatcctgacggccaacgacctggagatggaccaggtgaccggtctggagctgggggcggatgactatgtgaccaagcccttctccctggcggtgctgcgcgcccgggtgaacagcctgctccggcgcagccgtcctgcccccgccgcgctggagctccccccgttcctgttcgactttgacgccatggtctttgccagggacggcgtgccgttggagctgtccaagacggagcagcggctgctgcgcctgctggtggagcaccggggacagaccctgtcccgggaggtgctgctggaccgggtgtgggacggcggcgaattcgtggacgaaaacgccctttccgtggcggtgaaccgcctgcgcgccaagctggcggacgcccccatccgcaccgtgtacggcctgggctatcagtgggcggtggactgagatggactggaagctgatcctctgcatggggctggcggcggccggcctgctctttggtctgtcccagtggctgcgcgcccggcgtcagttggaacgcatggaccggatgctggaccgggccatcgatgggagctttttggagagctccttcgatgagtccgtcccctccgccctggagtccaagatgtcccggttcctcaacggctccgcctcctccgcccggaatctggcggaggaaaagagcaagatcgcggctctgatcgccgacgtgtcccaccagaccaagacccccatcgccaatctgctgctgtacgcctccctgctggcggagagcgagctgaccccggaacagcgggcccaggccgaggccctgaagacccaggcggagaaactctccttcctggtggatgctttagtcaagtcctcccggctggacaacggcatcctcactctgtccccagcacctcaccccatccagcccctgctggatggggcggccgcgcaggggctggccgccgccggacagcgtggcatttccctcactgtcctgccctgggagggcgcggcccgctttgactccaagtggacggcggaagccctttacaatgttctggacaacgccttgaaatataccccgcccggcgggacagtgaccctgtctgtcaccgcctaccatatgttctgctgcatccaggtctcagacaccggccccggtatcccggaggaggagcaggcccagatcttctcccgcttttaccggggggccgccgtccgggagcaggaagggctggggctgggcctctacctcacccgccgcatcctgaccagcgaggggggctatatccgggtgtcctctcagccgggaaagggcagcaccttctccctctatctgccactggagtgacggctcccccgcggccccgcccctgaaatctttcagctctgaaagatttcagaaagagtgtggaaaggatcttttgctagaatgggcactgtcaacaaaggcagcgcccatttttatccataaggagcgatcaacatgacaattttggagaccaaggatctgagaaaattttacggcagcggcgacacccaggtgaaggccctggatggggtggacctgagcgtggaaaacggggagttcgtggccatcgtgggcacctccggctccggcaagtccaccctgctccacatgctgggcgggctggaccggcccaccagcggcgctgtgctggtggacgggaaggacatcttctccctgaaggacgaggagttgaccatcttccgccggcggaagatcggcttcgtgttccagtcctataatctggtgccggtgctgagcgtgtatgaaaacatcgtcctgcccatccagctggacggcggcaaggtggaccagtcttatgtaaatcaggtcatcgaggccctggggctggagcagaagctccagaacctgcccagccagctctctgggggacagcagcagcgcgtggccatcgcccgggctctggccaccaagcccgctatcatcctggccgacgagcccacaggcaacctggactccaaaaccagtcaggacgtgctctccctgatgaaggtcaccgggcagaagttcgcccagaccatggtgatgatcacccacaacgaggagatcgcccagatggccgaccgcatcgtccgcattgaggacggcaggatcgtcaagcgctgagggggtggattccatgaacgtctccaacggcaagtgtatccgagacctctcccgtaagagcctgcgagccaaccgcacccggaacctgatcgcggtgctggccatcgccctgaccacggtgctcttcacctccctgttcaccatcgccatgtccatcaacgacggcatccagcagaacaacttccgccaggtgggcggcttctcccacggcgggttcaagtacctgacagaggagcagtttcacgaattgaaggacgaccccctcatcgaccagtggggtctgcggcgctttgtgggcatgcccagtgaggtgcccttcaacaaaagccatgtggaggtgggctactccgatgccaacgaggcccactggatgtactgcgacccggttgaggggcgcctgccccaggagggcaccgatgaggccgccacggacacccatgtgctggagctgatgggggtcacgccggagatcggcgccaagttcacgctcacctttgacgtggacggccatgagaccacccagactttcaccctgtgcggctggtgggagtatgacgaggccattgtggccaaccacattctgatcccggagagccgggcggacgccatcctgacggagaccggcgtggtgcccgggcagaccacggacggcatgaccgggacctataacatggatgtgatgctgaaaaatggggcccgaaatattgcaggcgacctggaccagatcctggaaaaccatggctatcaggccgagagctccgcgcagccgggctatatccataccggcgtcaactggggctacaccggcgcccagctgtccggcagcatggaccccgccaccttcatcgccatctgcgcggtgctgctgctcatcatcttcaccggctacctcatcatttacaatgtgttccagatctccgtcaccaacgacatccgcttctatggcctgctgaagaccatcggcaccaccccccggcagctgcggcgcatcatccggcatcaggccctggccctgtccctggcgggcatccccctggggctggtgctgggctggctcatcggcggacagctgacgccggtgatcgtccggcaggtgaacggagtgtccaatgtggtgtcaatggacccgatcatttttgcggcctccaccctgttttccctggtgaccgttcttctctcctgccgcaagccgggaaaaatggccgcccgggtctcccccatcgaggcggtgcgctacaccgagggcgggaacctgaaacgcagagccaagcgcagagccaagggcgtctccctcttctccatggcctgggccaacctgggccgcagccggggcaagacggcggtcaccgtcctctctctgtccctggcggtggtgctgctcaccgtgacggtcaccttcactcagggctttgacatggacaagtatgtctccaacttcactgccagcgacttcatcgtggccgacgcgggccagtttcagaccggcggcgacgcctataacgacgagatggacgtgacggaggacgtgatcgccgccatcgacgcccagggcggcatcaccggcggcggcttggtctacggaaagacctccgctgcgctggagttcgtcaccgaggagtactaccgctccgtctggagccgctggaacaccccagagcagctggacagcatggtccacttcaaggaccgcaatgaggagggcctgctggccgaccgggtgcagctctacggcatggagcagttccccctggaccacctgacggtgctggagggagacctgtccaagctcagtgaacccggcgggcggtatgtagccgctgtgtacagcgatgacgactacggccggcccgagatgggctcccactgggcccggctgggggacaccgtcaccatccggtatgtggaggaatatgagtactataatcccgacaccggagaggtgtacggcccatgggagaacgtgcccgagggtgccaactgggtggaccgggcggtgaagtaccgggacgtggagtacgaggtggccgccctggtgaccgtgcccatggccctgagctaccgctattacggcgcggatgagttcatcatgaacgaccagaccttcatccaggacacgggcacggacagcgtcatgtactatgccttcgacaccacggatgaggccaacgccgccacggagtccttcctggcggactacacggaaaatgtgaatccccagttcgactatgagagcaagtccacctacgccgcggagtttgaggggatgcgatccatgttcctgctgctgggcggggccctcagcggcatcgtgggcctggtaggggtgctgaacttcttcaacgccatcctcaccggcatcatcaccaggaaacgcgagatggccgtcctccagtccatcggcatgaccggaaagcagctgaagaccatgctggtctgtgagggcctgctgtacgctctgagctctgtgctcctgtccctggtcctggcggtggtcctgggccccctggccttctccgcccttcagagcatgttctggttcttcacctaccgcttcaccctggcccccatcctggcggtggctccggtgtttgccctgctgggcgccctggtccccctggcggtgtaccgctccatctccaaacacaccgtggtggagcgcctgcgggagtcagacaactgaccaaaccatacaacgggacagctcctccgcctgtgcggaggagctgtcccgttgtatatctctccatagggcccaccggatggggagatgacaaaaaggaggagccgggatcgagcggctcctcctgtccatcagggctcagccatagaacttatggcccccgatggtggtgatatgtgttttgttccgggaagcccagctgttggaagctgagtcaaagtagagcgccccggcggcctcctccaccacggcgccgtccatcgccagcttggcggcgatgatgctgccctcgttgggggtgcgcttggccaggctgccggacccgtaggtggggaactggttcttctgggccagcactccttcgatggtattggggaagatcgggctcttgacccggttcaggactacgttggccacggcgatcttaccatccaggctctggttcccgctctccgcgtagaccacgcgggacagccagaacaggtcgtcctggttgtagaaggagtcgccggaggcgatgccgccgctccccgtggtgatggaggtggtcccgtctgccgggtcccagctcagcttggcatcaaaggccttgaccagctccttcagcgggacgactacccgcccggcctccatgcggacgccctcggggacatagagatagcggccgttggccaccagatactgctggcccaccttggccgtcaggtccagaacggcgctctggaccgcagcggtgctggagcccccatcccaggtgatggtcacgctggggtccagggtctgagccatggcggccagcgccacataggtggtcccctgctccacagtctttcccgtgtccgcggggacgggctggccgttcaccagcagggtgtggtccagggccacagcgggctcggccgtgaccgaggtctgggtcccgtcggaattgatcgcctccaaatatatctcgtcagcggagatctcttctgtatcctgcgcttcgataccggtctggattccggtctcaagcacctgcgccgatccgtcggcggaggcgctctcctcctcgatcacaatggccgcggcggcggagtcctgctccacaccggcgcccatcaggaggagcaaggcaaatgcgcacagcagtgttgaaaacagcttgcgtttcattgtcttcactccctattacaatttgtgtcgaaacggtgacaccaaaagcaacgtttttgttacttttgttaccacattgtaaccaattcctcaaacaggcgcaagggcaaaattgactagagttctctctgaaatcttgtgcattttttcggaatattcctagtataagccttagaatgaccggttaagccctctttccccctcctttgacgcatttttacatccgcgctcttctgcctttctgcccattactcgctgtcttcctacccgccaggcacgtccatctttggccttttcctctgataattccttgacatccccttttttccgggtacaattgagaaaaaaggaggcgttcttatggcctattcgctgttcgagactgcggagctgggcccgctcatatccaaaaacaggaccgtgcgttccgccaccaacgagcacctctccgatcccagtggacagatcactcccgcctgggtggactccctggaggcgctggcccggggtggagtgggcatcatcatcacgggccacctgtcggtggaccgggaccagcgggcagatgaggggcaggcggtgctggatcaggagacggaccccgccctcctctctctggccgcccagcgggtccaccagcacggggccctgctcattgcccagatcagccacagcggcgggaaggcgcgccccggcgtcaacgggcggccgcccctctcccccggcgatctcacgccccagctgctggacaggctggtggaacagttccgccatgcggcccggacggcccagatggcgggctttgatggggtccaggtccactgtgcccacaattatctgctctccagcttcctgaacctccggtggaaccaccgggaggatgcctatggcggcagcctggagaatcggttccggttgatccgccgggtcctgctggctgtccgggatgcctgtggtccccgctttgccctcctggtcaaggtggacaacgacagctgtgatgacctgcctgccctgctccggctcttccagtccgccggcgtggacggcatcgagctcagcggcctggacatggcccgccgggacgggcagaagacccccttcttcctggaccgcctgctggctgcctgggaaggcctcaccgtacccatcttcccggtgggaggcgtcttttcccgcgctgcggcagaaaaggtgctggccgccggtgccccctttgtctccctctccagggcgctgatctgtcagcccgacttcgtggagcggatggaaaaaggccagacagagagcccctgcctggcctgcaaccactgctacaatgtgtaccgccagcgcccggtgcgctgtgtgctccataccgaagtcatcccccagctggaggcggtgttcggcccctaccccacctgactttccccgggcccgttccccggatcgggagcgggcccgctcacacttttgcccgccggtccccgcccttaaaaaagaaaacagaaaaaaatagaaaaaaggacttgactccagcggaaaagctggtataatacattttgctgtcacggtcgaccgcagacagcgccatggagagatggctgagctggtcgaaggcgcacgattggaaatcgtgtaacggctaatacccgttcgagggttcgaatccctctctctccgccacgccggagcaaagtccgctttgctccggcgattttttatctttccaggcgggcgctccgccgcctcgccccacccacttcaggagggatctcttatggatctgtgcgacatccagcaaatcaaggccttgttgtcccggcacggctttcacttctccaagtccatggggcagaattttctggtggaggactgggtgccccgggatattgcggaggcatccggcgcctccccttcctgcggtgtgctggaggtgggccccggcatcggccccctcacccaggagctctcccggcgggccgggcgagtggtctctgtggagctggaccggtccctcctccccatcctgtcagagaccatggccggccgggaaaatgtggagatcgttccaggagacatcctgaagactgatctggctgccctgacagcggaaaagttccccggccttacgccgctggcctgtgccaatcttccttataatattacctcccccgccatcaccgccctgatccaggcgggggtcttcgccgccatcaccgtcatgattcagcgagaggtggccctgcgtatctgcgcccggcctgggacaccggattacggggccttctccgtcttctgccagtaccacaccgccccggagctgctcttcgaggtccccccctcctgctttatccccgcacccaaggtgacctccgccgtcctgcggatgacgccccggcccgccccggccgaggtggatgacgaggcccacttctttcgggtggtccgggccgccttcgcccagcgccgaaagaccctggccaacagcctcacctcctccctgtccggcctgtacacgaaagaggacatccaggaggctatccggatctgcggcctcgccccggacgtccgcggggaacggcttggcatcccggagttcgcagccctctcgaaggccctgcgggcccagccccaatgagcccctgcgtcctatttctgaaacacagtgtgcgccaatagagaccgggccttcccagacgggaaggcccggtctctattgggttcacaccgcccgcatccggtggtcggtgcccaccgcagccgcggccgcgaggatggcgccccccgcccctgccatgatccaccgcagagagaccacatcggccagggggccaaagatggccatgcccaaaggcaggcacccggcgtacatggtgctgagcagtccgaacaccctgccctgcatgtccgcctccgtgtgctcctgaagcatggtggtgattgccgtctgcaccaccgtcagcgctgtcccgtacagcgccatcagccccagataggggacaaagtgccgggacagccccatccctgccgccaggacgccaaaagccagcaggcccgccgtcagggtcctccccctgcgccggaagccgccccaggtgctcatcagcactcctcctgctatcatccccgcaaagccggccagctccaccgctgtaagataccaataggtctccccaaaggtccgccggacaaagaggcccgccagatacccccctggcacgcagaaaaaggtgaccagcccgtatagtaccagcagcctccccgccagcctgtgggagaaagcacagctcaccccggcacggatatcagccaggaggggagaccgctccctagtccctctctgtccgggcagcgccaggcaggacagcagacccgtccccacgaccgccgtcaccacatcgatcatcagggtggtgcgcagatcactcaccgcgaataccgcgcctgccgccgccggggcggcgaaattcaccagcgactgcatggcggcattgaggccgttgtaccgcatgagctggtcctccgggaccagctggggaatggccgcgttcaccgccggggcctggatgccggcccccagggaacggaggagcgacatgaccagcaggccgcccagcagggccgggcccgacgggatgtggggaagcgcagggatcatagccaaggtggcgcaggcaatcaggacatccgctccgatgatgagtgcctttctgttgtaccggtccgcccaaacaccgcctaaaaaggagaccagaaactgtggcagataggagcagacagagaaggcggccacccacccgccgctggcggtctccatagccgcgtaccagaccagggccatctgcaccagggtggagccgaacagggtgatgcactggctggtcagaaagagcagagccctttttcgccatccggagggctgtctgttatctgtcatcccgcccctcctctccccggggaaggagcaccaggcgctgggtggggtagccgaactccgtcaacagctcacgctgggcaaagcccagttccagcagcagggcccggtgccccgtgtccgccctgtcccgttcccggtaggtggtggtgctgatctcctgatcgggcagacaggtctccgtcagtacgtccagaaacagccgctggagcccccgcctccggtactgggggtgcacccccagaaactcgatgcgtcccggccccgtggagaaggccagagcccccgccaaggtgtcaccctcccccaggaccagggcgtgtccggcgcgaatgctctcccgcagctgctccagatacgccccctcgtccatggcgggatagccgtcgatcaccagacgcatcagctccatccaggcagggatatctctctcttctgccagccggatctcctcctttctgaacgcttccctgcccctctccatacggagggtaaagggcagctggaggggatagaagttcccagccgcccggtaggccgcaggaggcgccttgtacatgctcttaaacgcctgggagaaggactgctggctctcgtatccgcactgcagagcgatctggctgatgggccgtcgggaaaaagccagcagcttggccgcctcagtgagccggcggcgctgcacatagtcatgaagcgtcattcccaccgtctctgtgaacatgcggtgcaggtggtatttggagtagtggaccgcctccgccaccgtctccagttccagcctgccgcccaggcggctctcgatatacctgatgacggtctgtatcccacggaccgctctgtcttccattgaagcccctcctctctggatggtatgataacagatttcatggaaaatggcttcctcattcttgcggttttaaaattttcctccaaaatgtaagggtgcagcctgacttgttttggccctgatgagctcctgaaaaacttgcccttgccattcttcggaaaatggagtataatattttcacgaaattttccaagaaattttgttgaaaataggaggattgccccatggaaacttatggactggaacagctgggcattatcagccccagcgctgtgtatcggaacctctcccctgccattctggtggagaaggcgctggcccggggcgagggcaagctgaattccacgggcgccctgtgcgtcaacaccgggaaatataccggacgctctcccaacgacaagttcatcgtggactccgccggtgtccatgacgagatcgcctggggcaaggtcaacgtccccaccacccaggaggtctttgacgccttgtatgagaaaatggtggcctatctccagaaccgggagatctttatctttgacggctttgccggtgcggaccccaaatacaccaaagctttccgggtgatcaacgagctggccagccagaaccttttcatccaccagcttctgctgcgtcccacggaagaggcgcttgccaattacaagcctgacttcaccatcatctgcgcccccggctttaagtgcatccctgagcgggaccatgtgaactcggaggccgccatcatgatcgactatgagaagaagatggtgctcatcgcaggcagccagtacgccggtgagatcaagaagtcggtcttctccgtcatgaactacctcatgcccaaggagggcgtcttccccatgcactgctccgccaacatcggtgaggccggggactccgccatcttcttcggcctgtccggcaccggcaagaccaccctgtccgccgatcccaaccgcaagctcattggcgatgacgagcacggctgggcggatgactctgtctttaatttcgagggcggctgctacgccaagtgcattgacctgaccgaggagcgggagcccgagatcttccgggccatcaagttcggcgccttggtggagaacgtcatcatggacgaggagacccgcgtccccgactactccgacggcagcctgactgagaacacccgcgtgggctaccccgtggactatatccccaatgccgccatccccggcatcggcggcacccccaaaacggtgatcttcctcaccgccgacgcctacggcgtcatgccccccatctccaagctgaacgagaagcaggccatgtactactttgtctccggcttcaccagcaagctggcgggcaccgagcggggcatcacctcccccgtgcccaccttctccacctgcttcggcgccccgttcatgcctctggacccctccgtctatgccgggatgctggctgagaaggtggccaagtccggcgccaacgtctatctggtcaacaccggctggtgcggcaacagcggcaagcgcatgaatctgaagtacacccgcgctatggtcaccgccgccctcaacggcgagctggaaaaagcggagttcgtcaccgacccctacttcggcgttcaagtgcctacctcctgccccggtgtgcccgacgagcagatgatccccgccaagcagtggggggacgacaccgccggttacgaggccaaggccaaggagctggccaagtcctttgtggagaacttcaagaagtacacccatatgcctgccgatgtggtggcagccggccccaaggccgagtaaagctggcagaactctatggggcgccgcatctgcggcgccccatttctatgaggaggtggacccatgaagcgatatcagatgtcagaatccctgccggtgggcctcctgctggcactggcgggcgggatcttggattcctatacctatttgaaccggggacaggtattcgccaccgctgagaccgggaacctggtcctgctgggcatccatttggcccagggagagctgggccgggtcctctcctgcctctttcccattctcgcctttgccctgggcgtcctgactaccgaggggcttcgccgccgcctgagctccggccgggtccactggaggcagcccatcctggcggcggagtgcctggtcatcctggtggtctccttcctgcctcagggagatctggacgccctggccaatgtgctcatcgcctttaccagcgccatccagatcgagagtttccgaaaatttgcaggctgcggatgcgccaccaccatgtgcaccggcaacctgaggagcggcaccgagcacctgttccgctggctccaccaccgtgaggggacctctggccgcagcgctctggtctattacgggctgatcctctccttcgtcgccggcgcggtcctcagcggactgctcacccccctctttgggacgcggacggtcctggccgcctgcctgcccctcctgctctctctggcgctgatgttccggctgccggaccccacatagccaaatggtaaagggggccgcaccccgcagggggcggggcccactccattactctgccgccggaacgtgggacaacactgcgtcccgcaggaagcgggcgcagccgggaacgcttttgtcataataggccgtaaagcgttcatcctgtacatacagctccgccagtcctcggtgcctggccggatcgtaggggctgctgccaaaggacagccacgcccggtgcagctccgccagcgctcggccggcctcccctgccgggtccgcgccggagcggacggcctcctccagcttcctctggatggcttcaccggtgtccttccagctctgataccgctcaggagtcaggtccaaaatgtcccgactggcccgctccgcctcctcgtctccgtacttctcccggatctccgccccgtagcgcgcctcgttttcctccacggcgcgccgcttgaacgcctcaaactttgcctcgtcgctcataaactcattcctttcttctgacaggatcgtccgctttacagtatggatcaattcctggatacgcccctcttccttttccaaggcggccagatggccccggagcgcgtccagccggtcaaaggatggatcatccagaatggctccgatccgggccagctccaccccgagggcccggtaaaacaggatctgctggagccggtctacctccgccccgccgtaatatcggtatccattctcgccgatgcggctgggcgtgagcagaccgatccggtggtaccagcgcagggtgcgggtggtcaccccggccagttccgccagcttctgaatggtgtattccataggcgtccctcctttgactgagtccattctacccgtttacgctgcgtcaatgtcaagtctgttttttcattttttctgcggtcacgccctgtggcctttttccccggttttcggcaaggctgcgggcgcgaaccctgtccacaactgcagtgccctctgccttggcagagggcactggtcttttataacttagccgctttactggtcctgtccttcctttctgctctccttccgttttttacgcagtatgctccgcccgatcaccacgccggccgccgcgatcacggccagcacgaccaggccgaacacatggtaggaaatccagatcagcatgccctggaagccatccaccagcccctccaggctggcggagaagccggccgccattttggctcccagcgaggaggtctctcccggctcctccgtaaccttcgtcacctcctgaagggtcagatcgatggtggagaagctcacaaggctgtcatactgattcatggtggagctgtactgttcgatctcatactccacgtcgctcagggcgctctccagggagatgatgtcctccatcacctctgcttccgccagaagggcctggagccgctcctgcttggtgcgcagggtcttcagacgggcctcggtgtcatagtactgggtgctgatgttctctgtgctctctgtcttactggccaggtagcccagctcccctgcatcctgcaaaaagccggtgtaggcatcctccggcacacggatgacataggagccataccggtttgcgttcacgttccgatagctcccgccctccaccgcggcgctctcgaaatagccccccgcctgattcaccatctcgttcagctgctgagccgcctggtcgaactcggtggtctccacatacagctccgcccggcggaccagcttggcgtccgggtcctggtagaccgggctctcctgaggggactggcttgggctctccacctcatagatcccgccaaattccgcggtctccccgccggcagcccccggcgtgctggaggcagtctgatccgccggcgccccattcccgccgccgcttccgcaggcgggcagcagcaggaccagggccagcatcaggggaaaaagcgcgcgtttcatggttcgcttcatggtatcgctcctccttttcatcgtttccgcaaggcaaagatcaggtctctctgtccgattagacgcctccgcctggaaaaagttccgcacctccgccccctttttttcatagaatgggaaaaaattgggaggtaatcgtatgcctatcatctatctctccccctccacacaggagtggaactactacgtcaacggcgggaccgaggaggaatacatgaatctcctggcggacaagatggtcccctatctggacgcctccggcatccggtatgaccggaacacccccagtatgacggcggccgactccatcgccgcctccaacgcgggaaactttgacctccacctggccctccactccaacgccgcccctgagggacagtacggcacttccagaggttccattgctttctattaccccggcagcatccagggcaagtgggccgccgacatcatcgccaacaatctgcgctccatctaccccctgccggacaaggtccgggcggtatccaccacaacgctgggcgaagtgcggaaggtccgggcccctgccgtcctcctggagctggccttccacgacaacccggacgacgccgcctggatcaaaaacaacctggatgagatcgcccgcaacctggtcctctcggtcactgagttcttcggactgcccttcctgactccgatccccgcccgctccggcatggtggacgtgaactggggctccctcaatatccgcagccgcccctccctggacgcccccgttctggcccaggccccggacggtgcgctcctcaccatcatcaaccaatggcaggactggtatctggtcaactataacggcaccattggctacgccaaagacagcttcgtgacgctgaactgatgcaaggaggtttctatggatatccatgttgtcaaaccgggcgataccctgtactccatcgccctttcccacggcgtgcccatgtcccgtctgctggaggacaatcagcttcctgacccctcccggctggtggtgggacagaccatcgtgatccagtacccggagcgcacctatgtggtccgctccggcgatacgctcttctccatcgctcaggccaacggcctgactgtcaagaccctgctccgcaacaacccctctctggcgggggaggaccgcatctttccagggcaggagctggtcctcgcctaccgccaggagaaacaggggaccctcaccgtcaacggatacgcctacccccacatcgaccgcgccctgctccagcgcaccctcccctatctcagcggcctgctccccttctcctacgaggccaccgccctgggggagctcaccccgctggacgacgtggccctggtggatgcggccaaacagatgggggtggtccccatcatgaacatcgccaacctgacaccggacggcatgttctcgccggaactggcccatatcatcctctccgatcccgccatccaggagaaactggccgccaacgtgatggaggtcatccgtgcccgcagctatcaggggctggacgtggactttgaatccatctacgccgaggatgcccagtcttatgtgtccttcatctcccgcctgcgggagcttgccgcgcccatgggcatcccggtccttgtggctgtagcccccaagtcctacgccaaccagccgggtctgctctatgaggggatggactacgccgggctgggccgggctgccgatttgatattcctcatgacctatgagtggggctactcctacggtccccctatggccatctcccccatccgcagcatgcgcaccgtgatcgagtacgccctgaaggagatcccagcagagaagctcctgctgggcatcccgaattatggctatgactggcagatcccctactcccagtccagaaaggcggtctccatctccaaccagtacgccgtctccctggccgcccgctactatgctgccatccggttcgacgagtcggtccaggccccctggttccggtacgtggacgagcggggacaggagcacgaggtctggttcgaggatgcccgcagcatcagggccaagctgagtctggtcccggaatacggcctgcgtggggtggggtactggaacctgatgcgtcccttcccccagaactgggtgatcctcaacgccctgtatcacattcgggaagggctgtaacatttttctctccgccgctggatttttgtcctcctttgtagtaaaatgaggtatcatttgtgcaaaggaggacattttcatgtctgttgaaattggcctgaagggccgcgcggaggagacggtgaccgacgcgaataccgctcaggccgcctgctctggcgctctgcccgtctacggtacgccctttatgaccgctctgatggaaaaggcggcctggacctccatcgccccccacctggcgccgggcgaaagcacggtgggcactgccatgaacatcacccacatctccgcctcccccgtaggcatccgggtctgggcggagagcgaggtcaccctggtggacggcaagcgcatcgagctgaaggtggccgcctatgaccaggcgggcaagatcggtgagggcacccaccagcgctttatcgtcacggatgaccgctttctggccaaggcggcccggaaactggagggctgagcggcatgtccattgaaaaagtccggcaatatttccagcctttaggccgtgagcaggatatcctggaatttgagacctccagcgccacggtggagctggccgcccaagccgccggcgtcatccccgcccggatcgccaagaccctctccttcctggtggacgagggctgtgtgctgattgtgaccgcaggggacgccaagatcgacaattccaagttcaaagccatgttccacaccaaggcaaagatgctcagtcctgagcaggtgtattcctttacaggccatgcggtgggcggcgtctgcccttttgccaacccggatggggtgcgtacctacctggatgtgtccctccagcgcttcgagactgtcttccccgcggcgggcagcagcaactccgcgatccagctcacctgtgacgagctggcggagtactcccacagcctgggatggatcgacgtgtgcaagggctggcaggagaccccctgaccctgttttcccatcagaaaggagcgctctgtttccatggagacaaaagactgtatcctgacccgccgcagcgtgcggaaatttacagaccggaaggtggagcaccggcttgtggagcagatcatctcgctggccgcctatgccccctcctggaagaacacccagatcagccggtatattgccattgaggaccccaaggtcctggaggagatctgccgcacttacgcccccttcaacgcccggatcatcggcaactgccccctgctcattgcccagacctttgtgaaaggccgctccggcttcgagcgggacggttccttctccactgaccgggaggcgggctggcagtactacgactgcggcattgcctgccagaccctatgcctggccgcccacgacctggggctgggcaccgtggtcatgggcgtctttgaccggaaaggcctggaggcgtatctccagattccggaggatcaggagctgatggccctgatcgccctcggctatcccgatgagtcccccgccgctcccaggcgcaaggagacctccctccttctcagctatcgatgaacaaaatggaaaagaggacctgtctgtgagacaggtcctctttttctctgttcagcggcgcgctcaattccgggacttgcccaaaaagcgcagcaggtacaaaaacaggttgatgaaatccaggtacaactgaagggcggagaaaatagacgccttctccagcatgtcggggtagcccgcatagtagttgtagtaggctttgatcttctgggtatcataggcagtatagcccaggaagatggcgatgcccgccaggcagaagatccggtccagggcggtaaagccggggataaacaggctgaccagcgcgaatacgaacaggaacaccagtccagtgaaaaggatggggcgcagccgggtcaggtctgccttggtaaaatagccgtaggcagccagcaccgcgaaataagccgcagtggccaggaatacgaaaatcaggctcccaaactcaaagatatacaggtacatggacatggtgaagccgaacagcgcagaaaaggcgataaaaatccctctggctgtccccactgacatcttttcaatgcgggagaccatcgtgatggacagtacgatggtggcgatcagtacgatcagatggatataaggcacataggccagggcgtagagtgtggcattggtgacccagcccagcagggcgatcccgaaggtgactagaagccccagcaccatccataaaaatgtcttggccgtatattgcccgatgctctccatccggctggactgcccatagtcccggtcaaactcataggggtcaaagctcataaaaacagctcctttctttctgatcggtcaggtgttgtgatcggcaacatgaaactgcttcagattcccgatcttgtgactgcggcggtccagctcctccagcacagcttccagagggatgttctgctgggccatcatcacggtgagatggtagatcaggtctgagatctcccccaccgtctcctcctgccgcccattcttggcggcgatgatggtctctgcacattcctctcccacttttttcagaatcttatccagccccttgtcaaagaggtagcaggtataagacccctcctgggggctggtcttccggtcctggaccacctgatacaactgcttccatacgtcgttcacagacattctcctatccgctccccaaaacggggagtcaactccccagcggaactatgggtatcataacataatctcctgaaaaaagcaactgtctcgtcctgtgtgacaggtagggccgtcgggcaggcaaaagtagagcagggtgtcggtatcgcagtcggtaaagatctgctccacatggaggaagtggccggaggtctcccccttgttccatagtttgccccggctccggctccaaaaccaggcagtctttgtctggagcgtccgctccactgcctcccgattcgtaaagcccagcatcagcacgtccttggtccgggcatgctggatgatcactgggatcagctctgatttttgaaacagctggtccaaatcaaacatatctatcctcatttctcccagggtggtttttttacctggtactcccacgggtcctttccaggctgaaaagcggacttctgctgcctccggccgccgtccgggacagacggctggccctctggcttgccctgctcccccttctttcgggagaacagcagctctccgcccacgtccagcaccagctccagcagatcgtccagcatggcatccgctcctctcagcgcaccgggatcttccgcttccgcagatactccttcacctggggcactgtcagctccccgaagtggaacagggaggcggccagagccgcatcacagtctgtctctgcgaagacctgggcaaagtgctccaggctgccgcaacctccggaggcgatgacagggatggagaccgcctgggtcacggcccgggtcatctccagatcaaagcccgccttggtgccgtctgcgtccatggaggtgagcaggatctcccccgctcccagcgcctcgcccctccgggcccactctacggcgtccaggccggtgggggtgcgccctccggccaccaccacctcatagctgccctccggccgccgccgggcatcgatggccagcaccacgcactgggagccgaatcgctccgccgcccgggagatcagccccgggtccttcaccgcggcggaattcacggagatcttgtccgcacccgcccggaggagctgccggaagtcctccagggtgcggatgccgccgcccacggtcagggggacgaacacctgctccgcagtccgctccaccacgtccgccactgtggcccggccgtcgctggtagcggtgatgtccagaaagacgatctcgtccgccccctggtccgagtagaaccgggccagctccaccgggtccccggcgtcccggatattcacaaagttgactcccttgaccacacgcccgtcccggacgtccagacaggggatgatgcgctttgccagcatacgatcacctcaatcctgacggccggcgtcccgcactgcctgggccagatccaccgtccccgcgtagtacgcctttcccacgatggccccgtacagccccatgcgggccagacggcggatatcctcattggacgatacgccgccggacgccacaatattcccggtgtacacctgtttcagggcctccagccgggcaaaggagggaccggagagggcgccgtccgtctcaatatctgtaaagataatattctttacgccaacttccatcatagactttgtaaactccaagtagtccaatccagagtcctccacccagcccgcggtcctgactctgccgtcctgggtgtcgatccccaccgcgacgcgctccccatagcgctccgccgcagcgcggacaaaatcagggtcgctcaccgcagccgagccaataacggcccgccccaccccggcctggaacaccgcctccaagtcctccatgcaccggatgccgccccccagctccacctggagaccggagcgggcggtgacctccgccacgatcccgccgttgattcgggtgcctcccctggctccgtccaggtccaccatatggatccagcgggcaccggcctcggaaaaggcacgggcggtctccagtgggtcctgggcaacctggtggaccgtgttgaaatcacccttgtaaaggcgaactacttttccgtcttttaagtcaatggcgggcagaatatacatggctctgtcgctccctttctgttcagatcctgccggtcctcagcagttcagccctgcgaaattgcgcaggatggtcagccccacctcgccgctcttctccgggtggaactgggtcccgtagaagttcccgctggacaccgccgctgtcaccgccggcccgtaatcggtgacagcgatcacctgggcgggatcggtgtcttgggcgctgaaggagtggacgaagtagacatacgccccctcgtccagcccccggaacaggggcgagtggtgaaaaaaccgcaggctgttccatccaatgtggggcagcttgctttgggtgggtatccggtccactgtgccgcggatcacccccagaccgggacaggggcgcacctcccgcccctgctccagcagcagctgcatccccaggcagatgcccagcaccggcttcttctgaccctgggccagcacatgctggtccagccctccgctccgcagccggtccgccgcgtccgggaaggcccccactccaggcaggataatggcgtcagcccgttccagctccgccaggtcggcggtgatgcagctgctgcagccgagatagctcagggcgttggccacactcttcagattgcccaccccgtagtccacgatggcaactgtgcccatcacagcacccccttggtggaagtgacgccggtaccggtgatttgaacggcctccttcaccgccgctcccagggacttgaagagggcctctgtgatgtggtgggcattttttccataaaggcacttcatatgcagagtgaggccgctgttcactgcaagggcccgcagaaactcttcggtgaggcagggatcataagtcccgatcataggctgaggcatatcagcgtcaaagaccaggaagggccggttagaaaagtccagaaccgtgaagcacagggcctcgtccattgggatacaggcggaggcgaagcggcggagccccttccgatcccccagggcccggttcagagcctggccaaggacgatgcccgtgtcctccaccgtgtggtggccgtctacctccagatctccctcggcctctattttcagccccagtccgccgtaaaaagcgaaggctgtgagcatgtggtcaaaaaagcctatgccggtggatatgcggatctcgccgccttccaggcacaggtccacgctgatccgggtctccttggtcctgcgctggatgacataggcccggcaagggctctcctccgcctcatatactgggatttccattatttttcctcctcttcccgccccccgtcgggagcattgtcctccaaaaacggggtgtacatcatcatcgcgtggttctccaccaccagccggtcctccagcagctctccctccagatcaaagacctggagatacagctcattgtggcggctgcatccgccccaccactcatggcgcatctcatgatgacgctccacgatctgataccggaactggggcggccggtcggagcgccactccccctccaggtccgtctctcccacccggaggcacagctggaagggccggtccgtgggattatagatcatcaggtctccgtagggatagaagcaggtggctccgctcccaaaaggctgggtccggttggagtcgggaaagacgtcgtagccatgtcggtgacgctccttcacctccagcggggtgtgcagggtcatccaaaagatgagattggacagctgacacaaccccccgccgcatccgtactgcacggtcccgtttttcagcagcacgccatccagataccccttccggtaggtggggcggccgataagcttccaatagctcagcgtctcccccggctggaccacgatcccgtccagccgggccaccgccagcttcaaattggtgatcttattgtgctgatactgcatctccacatccttcagctttcggagcagaggggtgtggtgggccatatggacgcagggcagcctgtccttctgccgctgggaggcgaaccgatacttgccggacatccacagcaggtaccgccgcgccgagtagtaggcggtccccaggcacaggcgcagggcggagcggtgcttggaccgcaggccgtggggatctgcccgcttggacattctcatcccgatctcctttcccgttccccctccgggggccgtcagccgtccatccgcacccggatggagttggcgtgggcagtcagatgctcggtctctgccagtgtgataatctccccggcaatgggcgccagggcggctcggtcgaattccagcacgctcatggtcttcaaaaagctgtccacgctcaggggcgagaagaagcgggcggtgccgctggtgggcagcacatggtccgggccggccagatagtcccccaggggttccggcgtataggcccccaggaagaccgctccggcgttcttcaccagaggcagcagggccctgggctcctccgtcatgatctcaaggtgctccggggcgatctcgtttgccagctccacacagcgctccaggctgtcacagacgatggcgcacccgaagtcccgcagggattcctccatgatctccgagcgctccagatacccggtctgccggaccacctcccggtccaccgcctgggccagctcccagctgtcggtgagcagcacggctgaggccagccggtcgtgctccgcctggctgagcaggtccgcggccacgtacttcgggtccgccggcctgtcggcaatgaccagcacctccgaggggccggccaccatgtcgatgtccagactgccgtaggccaggcgtttggcggcggccacataggcgttgccaggccccaccagtttgtccacccgggggatgaagcccgccccgtaggtcagagcggccaccgcctgggcgccgcccactgcaatgcaccggtccacgccggcgatgcgggccgccgccagcacggcggcgttcagattctcggtgggcggtgtcaccatgacgatctcctccacccccgccaccttggcggggacggcgttcatcagcacgctgctgggataggcggcggtcccgcctgggacgtagatgcccacccggctcagcccccggacgatccggcccacccggcctccgtccggtgaggtccactccatggtccgggagagcagcttctcgttgtagtcccggatattggccgcggcgtgctccagggcggcgatcagctccgccggacagctgcggtaggcctcctccagctgcgccctggtgagctcatagggctccctatggtcaaactgccgggagtagtcccggacagccgaaaggccatttccctttacattctgcatgactgctgagacagccagctcgatatctgcgtttttctgtgcggcgcgggcgcgcatggcctccagctgccgcacctcggaagtgccatccgctttgatgatggaaatcatatgtctctctccaattccgcctcacagcggtcgataaaatcgttgatctggctcttgtgcagcttcatgctggcggtgttgacgatcagccgtgcggacaccggggccactgtctcgatgggcaccaggccgttggccttcagggtagccccggtctccacgatatccacaatggcatccgtcagagagaggatgggggccagctccacgctgccctcgatcttgatgatgtccacatccatccccttctccgcgaaaaaggcccgggtcaccgccggatacttggaagccactcgccgggtcttataggtcccatagaagtcggtcccctccttcactgccagagcgaagcggcagcggccgaagcccaggtccagcacctcatagaaggcgccccccttctccaggatggtatccttgcccaccagccccaggtcacataccccgtgctccacataggtgatgacgtcgggcgccttggccagcacagcgtccaggggatagttggggatggcgtggaccagccgccgccccgggtcccggacgggggtgcagtccagccccatcctctcaaacagctccaccgacttgtcctggagccgccccttggtcagggcgatacgcagacggccgctcataccttcaccaccctttctccggtcacatcaaagaccagcacagtcttggcgcccttctccctggccaggctgcagctggattccagcgtgcggcagggggagagctcacaggtccccgccggccggctgtccaccgcctccagcgccttggccaagtagccgggggcgtagtggaccacagtgtccagcgcggatggggcagcctcgggcagggtgcgggccatagcgtccacatctacggcaaagccggtggcctgggcctcccggccgaatacccccaccagcgagtcgtagcgtccgccagacagcaccgcatcccctgctccctccacatagccccggaagaccacgccagtatagtagtcgatctggtggaccatccccaggtcaaagcggaccagcgcgccgtatcccgccgcggacagttccccgtacagggctcggaggtactccaccgcctccgtctccccggccagcgcctccgcctcatccagcacctccggcccgccgaacagccgggagaggcgcagcagggccgcgctggcggggttctcccggaagggggcgagcatatcccgcagggcggcgaagtttttgccctcgatcagggcccgcatccgctccatctccccctcctccagctccatccgggcggccacatcccggaagaagccggcgtggcccagctccacatggaaccgtgaggccccgcacacccgcagggcgtccactgctgtggccaccatctccagatccgctttcatcccggcggctccgatcagctccaccccgcactgggggagctcccggttcccgccgctgtgggccggcccggcccggtacacggtctggtcgtagtacagccgctggggcaggggcagggcccgaagctttgtggccgccacccgggcgatgggggtggtggaatccggccgcatgacgcagagcttcccactttggtcgaacacctgtaccatttgttcctgggggatggcactgcccgagcgggcaaacaggtcgtaaaactccgtctccggggtggacacctcccgatagccccgctggcggaagagacggatcagccgctcctgcacctgtcggcggcccatgcactcggcaaacagacggtcgcgggtgccctccggggtattgacagtcaatttcatgatctggctccttgtcaaccgcgggacagcgcgctgtctccgctttcattctttactacgctaatatactactataagaaagtgctgtcaagaaaaatcttgcaccccggaaaaagcggcgcggagcaggacccgttccggtcctgctccgcgcaaagcaaattggggtcacagcacgagagagggggcggtgtagacccgggcggccatctcgctgttgagcatatacagccccttggcgtcctcgccgtagagcttcatctttttgatcaggtcctcggcgttcttctcctcctcaccctgctccttgacgaaccagtccaggaactgcatcgtccgaaaatccttggcgctgtaagcggcttcatacagcgtgtggatcaggccggtgacataccgctcgtgctccagccccagctccagcacccgcaggcggctggtcagctccctgtcgggcttggcgatggcctccagcgtcacctttccgccgttgttctggagatactgcaccatcagcatggcgtgatcccgctcttcctgcgcctggatcttgtaccagttggcaaagccatccaggccctcctcctcatagtagatggagaaatccaggtacagataggcggaataaaactccttgttgacctgctcgttgagcagctgcgcgacctttgcgtccagcataaaaaacaactcctttttcttttttctgaaactctttctgagtcaagatcctccccctctgttccccgctctggtgcgggacagacagacggatcaggaccccgacctctccacgatctgcctctatcctaacacagaaccgggcatccggcaacctcgatcccatctactcccttttaccttttgggctgatgtgttccaactccgtcgatttcactatgcgttgattaaggcataaaaatatgttaaagtaaataaaaagataaatctgaagttgtggaggtaagaacaatgaaaaaatacgaatataaggttacaacaatagcgacaactatacctataacgacaaaaggatatgaaaaaataatacaagaatttgaaacaaaattgaacgaacttggaagtgaaggctgggaatttgttcagcgagtggatagtctttttttcttcaagagagaacttgagtaaattagaatttgtcaactgttcctgccaaggattgccccatcgttgaaatgacgatggggcaatatttatatactaaatcagtccaaagggtaatagggatcccatccatctgtgcagaccgttccatcggtcaccccagcatggcgaacaggtccagctggctggtggccggcatatctccgaaagcccccgcctccgtcagcttgtcgatgtgggtcttggagaccttggggcaggcagcggagacctcctccacagagatgaacctccgtcccttagcctgctccgccagagacagggccgccgtttcccccagccccgccaccgagatgaagggcgggatcagcgccttgtgttcctcgtccacccggaagtggagggcgtccgacaggtacaggtccatccttcggaaggtgaatccacgcagatagaactcatagcacacctccagggtggtaagcatgtcctgctccaccgcggaggcgtccttgtccttggcgatgatctccctcatcttcttctggcacacatccatcccctggcacatgaactcctggtcaaatgccttggcccggatggagaagtaggcggcgtaaaaggccagaggccggtggaccttgaaccaggcgatgcggaaggccatcatcacataggccaccgcatgggccttggggaacagataggcgatcttcttgcaggagccgatgtaccagtcaggcaccccgtgctccttcatctcctcctccgccccctccggcaggccgcggcccttccgcaccgcctccatgatcttgaaggagcgcttggggtccatccccttggagatcaggaacagcatgatgtcgtcccggcaaccgatggcctcgctgaccttggcggtgcccgaggtgatcaggtccttggcgttgcccagccacacgtcggttccgtgggagaagccggacaggcggaccaggatatcgaactggttgggctgggtgtcctccagcatcccccggacgaaggaggtgccgaactccgggatggcagtgccgccggtgggccccaggatcttgtcgttctcatagcccagcaccttggaggactggaagatagacatggtctccgggtcatccagtgggatcttctgggggtccaccccagtcaggtcctgaagcattcggatcatagtggggtcatcgtgtcccagcatgtccagcttcagcaggttggactccatggagtgatattcgaagtgggtggtgacgatatcggtattggggtcgtccgccgggtgctgtacgggacagaagtcatagatctccttgtcctgggggatgaccaccatgccgccggggtgctggccggtggtgcgcttgacgccggtgcagccgatggccaggcggttctcctccgccttggaggccgtcctcccccgctcctccaggtacttcttcacatagccgaaagccgtcttttccgccaccgtaccaatggtcccggctcggaacacgtgggtctgtccaaacagctcaaaggtgtaccggtgggcgctggactggtactcgccggagaagttcaggtcgatatcgggcaccttgtctcccccgaagcccagaaaggtctcgaaggggatgttgaagccgtccttcacatagggcgtgccgcagacgggacagttcatatcgggcatatccgccccgcacccgtaggggtgggcggggtcctgggcgtagtcaaagtccgagtgcttgcacttggggcagcggtagtgggcgggcagggagttgacctcagtgatgcccgacatgaatgccaccagagaggagcccaccgatccacgggagcccaccagatagccgtgctccagggagttctgcaccagcttctgggcggacatgtagatcacgtcgtacttgcagcggatgatatcccccagctccacgttgatgcggtccaccacgatctggggcggctcctcgccgtagagctcatgggccttgccccataccagccgcttcagctccccgtcggagtcctcaagcttgggggcaaacagtcctttgggcaggggctcaatgggctcgcaccagtccgcgatgagattggtattcctcaccaccacgtcgtaggcggtctccttccccagataggaaaattcctccagcatctcggtggtggtcttgaagtagatgggcaggggctcgtccgcgtcctcaaagcccttggaggccagaaggatgtggcggtatatctcgtcctccgggtccaggaagtggacgtcgccggtggcgcacaccggcttgcccagctccttccccagggccacgatggcccggttgaagtcccgcagctcctcctctgtgcggaccatccccttgcggagcatgaacatattgttgcacaggggctggatctccagataatcgtaccaggaggcgatgcgcttgagctcctcccagtccttgccgtccgccaccgcccggaagagctcgcccgcctcgcaggcggagcccaggatcagcccctcccggttctcgttgatgacgcttttgagcatgatggggtaacgcttgaagtagtccagatgtcccagggagatgagcttgtacaggttacgcagaccggtctggttccgcgccagcacgattaggtgcttgggctggcgcttggcctttcctcccttgcgcaggtggaccatggccccgttgatctcccccaggtggcgcaggcccatctcctccagcatcttaaagaacgggggcagcatgtagcccaccgtggccgcgtcgtcgctggcccggtggtgattgaaggcgggcaggtgcaggtgctccgccacgatgtccagcttgtacttgcccaggtcaggcagcaggttctgggccaggatcaggctgtcgatggagggattgtggaagggaatgccgtatttccggcagccggcggcgataaagcccatgtcgaagtcggcgttgtgggccgccaggggccggtccccggcaaaagccaggaaagcccgcagggcctcctcctgggagggggcccccaccagcatctcatcggtgataccggtcaggcggatgatctccggactcaggatgcggccgggggagacaaaggtgttgaagcggtcggtgatctccccgtttttcagcactacggcgccgatctcgatgatgacctcgtacttccggttcagccctgtggtctcgatgtcgaagcagacgatctcctggtcaaagggctgttctgtttccccgtggaccactactctgtcatccacgtcgttgatgtagtacgcctccacgccgtacaggatcttgatatttttggcggagtgccacgcatccgggaaggactgggccaccccgtgatcggtgatggcgatggcccggtggccccaggcctccgcccgcttgaccacgtttttgtccggccccagcttgggaccgaccgaggtgagggcgtccatagcggacatggtggtgtgcaggtggagctccacccgcttttccggcgcgtcatccatcttcataggcttgggcaccgccatgatggacatgggctccagcaccatgtcgccgtagaaccggtccatgttcagccggccctggatctggaggtgcatccccttcttgaccccgtccacgatgggcttgccctcgtctccggggaagaatttgttcacccgaatggagccggtgtagtcggtcagatcgaaggccaccacccaggcgccccgctttttcagctcccggttgtccacggcaaagacatcgccctcgatgaccaccatgcccatgtccagctccagctccccgatgggggtgggccgcttcttgatgacatgcccgaaaatcgtcttgccggagggcttgccctccccttttcccttgggtctggccgccggcgcgctcccccgggccttccgcagcgcctcccgccgaatggcctccgtccgcgcgaaggcgtccatctccggtgccgtgctctccccctgccgaggatgggccgggcgggtctggggcgcggaggcaggcacagaaggagccgccggtgccggcgcttcggcgggggtctccggctccggggccgccatctgaaacttcactgaggcgagcccgtagcaccgggccacggcctcctctgcctggcggatcagattggccccggctcccctggccccatccagggtcaccagggcgctccggctggccttgtcaatggccgcggccacaatgacccagccctctacggcctccgccaactcctgccactggcacagggcagcaaacatttgtaaaaatgggatcttcttggacatgatgcagatgctccttgcgcttgattctcagtcagtgggatggtggagcgccccctgtgttacagttcctcgatcagggcaaacagctcgtccaccagccggtcctgggggacctttttcacgatctccccttttcggaacaggaggccttcgccgatgccgcccgcgatcccgcagtcggcggcagacgcctcccccggcccgttgacggcacagcccatcaccgccaccgtgatgggcttgtccacccccttcagccgctcctccacctgggtagccaggccgatcagatcgatgcgggtccgcccgcaggtgggacaggagaccagctctgccccctcccgccggaccccggcggccttcaggatgtcccgggccgcgtagacctcctccaccgggtcggcggagagggagacccgcatggtgtccccgatccccagggccagcaggcccccgatgcccaccgcagacttcagggtgcccatccggaccgtcccggcctcggtaacgccaatatgtaaaggataattgcttttctctctcatcagctgataggcccgcatggtcatggggacgccggaggacttcagcgacacacagatgtcgtcaaaatcgaatttgttcagcagacggatgtggccgaaggctgactccaccatggcctccggacagacgccgccgtatttggccagcagtcccttctccagagagccgccattgacaccgatgcggattgggatgccccgcagacggcaggcgtctgccaccgccttgacccggtcctctccaccgatattgcccggattgatgcggaccttgtccgctccggccgcgatggcctccagggccagcttatagtcgaagtggatatccaccaccactgggagcggactggcctccttgatcttggccaccgcccgggcggcggcccgatcagggaccgccacccgcacgatctgacatccagccgcagccagggaacggatctgggacagggtggactccacatcgtcggtgcgggtattggtcatggactggatggtgaccggcgccccgccgccgatggggatgccgcccacatggatctgtctggtcattgaaacctcttcctttcccatatctggtccggctagacgccgaacagcttgcccacgtcgctgaaagtcacagccagagacagggtcagcagcagggccagccccgccatatggacgtacccctcatactttgggtcgatctttctgcggaacagcccgaagagcaggccgttcaggaacagaaagaaaatgcgtcccccatccagcgcggggaggggcagcagattcatcaccgccaggttcactgcgatcagcgcagacaggtagaggatgttatacaccgcgtcccccaccgtctcagactgggtccccacctgggagatggtggtcacgatgcccaccgggcctgacaggtcccgcagtccaaccaccccggagaccagatctcccaggctgatccagaccgtgcgcacaaaatccaggctgttgtaccagctgtacagcagcttgctgcccagggtggcggggatgatctcccgccccacgctgatcccccgcaggtatgtggtcttcccctcctcatccgtgcgggcctggaggggcatctcaacgccgtccaggcggaccttctcgccgtcccggagcaccacgaaatccagggtatcccctgcccgaccgagaaagaaggtcaggttattataattgtagatccggtgtccgtccagggagtagaccacgtccccgggctggagcccgctgtcctccacaccgtagccctccagaaagccgtctatggtgggcagcacgaaaccggtggcctgggaaaaaaggatcaggatcagcacaaagccggtcagaaaattcatgaaagccccggcgcagaggatgacgatctttttccacccgctggcccggccgaaggcccgggggttgtcgctctcctcatcctccccctccatggcgcagtatccgccgatgggcagggcacgaatgctgtaaagtgtctcccccttctccttcttccagagagcgggccccatgcccaccgcgaactcattcacctgcacccccagcagcttggcggtggcaaaatgccccagctcatgggtggcgatcagcacgccgaagatcagtaccgcgatgacaacataaaaaagaacagaaccgagcatagaacctccaaaagaaaatcagtctggaccttgtctcatacggcgcgggccgcccggtccgcctccagaatgtcctccagagtgggccgctggaccacagggacctgatccatggcccgggcgacctgttctgcgatgtccaggaacccgatcttcccctccaggaaccgggccaccgccgcctcattggccccatttaagatggcccccgccgtgccgcctgtccgcgctgcctccagtgccaggggaaggcagcggaatgtatccagatccggcgtgccgaaggtgagcggcccacagttccacaggtccagcggtgaggccggtcctgggatgcgctcaggccaggtcagggcgtattggatgggcagacgcatgtccggcgtccccagctgggcgatcatggcattatcacagtattccacaagggagtggataatactctcccggtggatcacaatggaaattttctccggaggcatgtggtacaggtgcatcgcctcgataaattccaggcccttattcattagagtggcggaatccacagtgatcttggcccccatggaccagtttggatgctgtaaggcgtcctcccttgtcattcctttcagctctgaggccgtacgcccataaaagggccccccggagcaggtcaggatcagcctcttcacacctccccggtcccggcagccctccaggctctggaagagggcggagtgctccgagtccaccggcaggatctccgcgccggacgcctccgctgccgacatcaccagctcccccgcacataccagggtctccttgttggccagggcgatgcgctttccctcccggatggcggccagggtggggcgcagccccaccatccccaccactgcggtgagcacagtgtccgcaccgggcagggaggcggcctccagcagcccctccattccggcggccacccggacccccgtgtccgccaggcggaccttcagatcagctgcggcgtcctcctccatcaggacggccagctccggccggaaccggcgtgcctgctcctccagctcccggacgctccggttggcagtcagcgccgccgcacgcatgccacaggcggcaatcacatccaatgattgccgcccgatggaaccggtggagcccaatattgaaatacatctgctcatatgacaaaactcctcgctgaccaccgtatccgcctaaaaggctggaaacagcgtcaccatcagccagagagccggagccgcaaaggtcatgctgtcgaagcggtccagcatcccgccatggccagggatcacatttccatagtccttgatcccatactgacgcttgatgagagagaaagacagatcccccagctctgtaatggcgcttcccacgagcccgtagaccaccatcagagggaaattcacttctatcccgccgaactgatgcaaaatggctccgtagagcagcatgaacagccccccgaacaggatgccgccggcatagccctccagtgatttgttggggctgacccgagtgatgcctttgtgcttcccaaagaacacccccacgaagtaggcgcccgcatccgtgaggaaagcggagatcaccggcagcaggaccagatatctgccgctctccatccccttgagcagcaccagcgtggacaggaacgccgggatcacgatcccgccgaacatacacaccagcagatcctccagggagatcgcgctgccgctgtcaaagcggcggatggcccccagaaaaagagcggccatcagcagcagggacagggcagccagggaccagttcccccaccccagccagaaggtcagggggatcaggccggccgccgccgccgtgtagacatacattccattgtggtgggccaccttggtggccctcagcagctcaaaggacgcccgcgcggtgatgcatgccagcagtaccgcgagaaagacgggcggcagaaagaacaggacaacaaaaaacagcggggccaatactacagccgagaggatgcgcgtcaccatttctcaaatacctccaaatcgccgggcccggctctgatagctggcgatggcccgcagcagctctgctttgctgaaatccggccacagcacatccgtaaagtagaactccgcataggcggactcccacagcaggaaattggataggcgcagctccccgctggggcggataatcaggtccgggtccggcaccccgcgggagaacaggtagccggagaagttctcctgtgtcaggtggttggggtccgccctcccctctacacagtccagggcataggcccgggcggcccggaggatctcgtcccgtccgccataattcaggcagatattcacctgacagccgtcgtacctcttggagatgcgtcgggtctgctcacacaggtcccggagctcctgggacagcggagagaggtccccgaaaaactccatcttcaccttgtcccgttccatctgtccgatggcctccagcagatacttcttcagcaggcccatgatggcgcccacctcatcctccggccgcttccagttttccgtggaaaaggcatagaccgtcagatactccaggccgatctccttgcagtaggtggcgatggtgcggaaagtctccgccccggcggcatgtcccgccgaacggggcagcccccgctttttggcccaccggccatttccatccatgataatggcgatatgccggggcaggtcctgaaagtcaacctgtacctccggctgaggcttctttgtaaacagcggcatatctgatcttccttacccaaacaaaatgctgagagcgcacgtgcagaatgaagaatgaacgtcttgagaacattccgcatcctgcattgtgcagcccgcatcgctcagaccgccatcagctcctgctcctttttcgcggtcagctcatccacctctttgcaccgcttgtcggtcaggtcctgaagctccttttccagctgcttctggtcatcttcggtgatctcgctcttcttgacctgttttttgatctcatccatggcctcgcgccggatgttccgaagggccaccttgccctcctcaccgtacttgtgcacctgcttggtcagatcccggcggcgctcctctgtcagctgggggaagcccaggcggatcacccggccgtcgttctggggattgatgcccaggtcagaggtctggatggccttctcgatcgccttgagcagggtgccgtcccagggctggatcatcagggtgcgggggtcgggggaggagatggccgccacctggttgagcggggtgggcgtgccgtagtactccacgaaaatacggtccagcacgccggcattggcccgtccggcacggacagaggcgaagttggccttgaccacttcgatggtcttctgcatcttggcatcgtaaacttttgtctcagggctcatcgtcgaatcttcctttctgttgtcagctggcgccttggttcagccttttacaatggttccgatcttctctcccatgaccgcccggatgatgttctgagggtccttcagagcgaagagcagcaccgggatcttgttgtccatggagagcgaggtggcggtggagtccatcacctggagatgctgagccagcacgtcgtcgtaggtgatggtgtcgtatttgaccgccttggggtccaccttggggtcggctgaataaactccgtcgatgttcttggccaggaggatcacatcggcgtcgatctccgccgcccgcaggaccgcagctgtgtccgtggagaagaaggggttccccgtgccgcagccgaagatgaccacccggcccttgtccaggtgccggatggctctggagcggatatagggctccgccaccgcccgcatctcgatggcagtctggacccggacgtccactcccttctgctccagcacgtccgccagggccagggcgttgatgctggtggccagcatccccatgtggtcggcccggacccgttccatccggtcgccgccgtccttcagcccgcgccagaagtttccgccgcctaccacgacgcccacctgcacgcccagctgggtgcactccttgatgacctcgcacacctgtccgatcacgttgaagtccagtccccgggaggcatcccccgccagggcctcgccgctgatcttcagcagcacgcgtttatactttggctgttccattggaaacactcctcgcatcaagatcaatgattcatccctattctaatataattctcctcttttgcatagggggtacggcaaagtttttcattttccctggaggagcaccgggacaccccctcccgcatagtgtgaagcggggggagccgtcagtgcgctccccgcctatcacagcggcgcgtgacccgcgccgggaaaggaacagtacattggcacaggcactgttatgggccgccggcggaacagggttcaccgctctgctcaccgccctgggggcggccaccgtatttttcttccggagccgccctgaccccacggtccaccggatcttcctggggttcgccgccggcgtgatgatcgccgccagcatgtggagcctcctgatccccgccatcgaggaggcggaggccatgggcatggtgggatgggtcccggccgctggggggtccgtcctgggcatcgccttcctgctggccatggacgccctgctcccccagctcacccctgaatccttccgccatctgggccgccggaccccccttctggtcctggccgtcactctccacaacatcccggaggggatggcggtgggcatctcctttgcgctggcctcccagggggacacccccgcccagctcaccgccgccgtcgctctggccctgggtatcggcatccagaacttccccgagggggctgccatcgccctgcctctgcgccaggaagggctcagccgggccaaatccttttggatgggggccctgtccggcgtcgtggagcccattttcgccctgctcaccgttctgatggtaggcagcctccagccgctgatgccctggctgctctcctttgcagccggcgccatgctgtatgtggtcgtggaggagctgatcccgggcgcccacctggaggaccactcctcccggggcggaactctgggggtaatggccgggttcctgctcatgatgatcctggacgtagccctgggctgagtctacaaatatgtaaagccgccctgaggcggctgttcacaggtcctttttgatctggcgcagggcgttcttctccaggcgggacacctgggcctgggagatccccacctcggtggacacctccatctgggtctttccctgaaaaaaacggagggacaggatgcgcttctcccggtccgacagcttggcaatggcttcccgcagtgcgatctgctccagccagttctcgtccgtgtttttgctgtcccgcacctgatccatgacacagatggtatccccgctgtcggagtacaccggctcgtagagggagaccgggtccacgatggcatccagggcaaagaccacttcctcccgcttgagctccagcatcctggctatctcgtctacggttggctcccgctggtgctcggccatataggcctccttggcctggagcaccttgtacgccgtgtcccgcatggcccgggacacccgcatggtgctgttatcccggaggtaccgccggatctcccccacgatcatgggcacgccataggtggagaagcgcacgtccagatccgtgttgaagttgtcgatggccttgatgaggccgatgcaccccacctggaacaggtcgtccgcgttctccccccggttggcaaagcgctggatcaccgagaggaccagccgcaggttgcccgcgatcagttcctcccgggccttcatgtccccctgcttggcccggagcaggagggcctgggtctcatcgtttttcaggaccttcagctttgacgtgtttaccccgcagatctccaccttgttttgcatctgttggaacctcctgccatgatactgtgctttcagtatctccgggacagagggtttcataccgcggggagcggcttaaaaattttaacgctcgacagggttcgatggaatttcaggaacagccggaaagcgggacagcaggcagtacgcgctctgccccggcccccatctggggccggggcagagcgcagccgttcaggccgtcacagttccttgaccgcgccgctgcgggacagggcctccgccgcggctaccgagaccgccaggccgaaaacgccctggatcaggttgcccgggatggcggccgccgctcccaggccgaatccaaggaccactccttcataggcgaagtagcccgccaccatcaccgcctcccccgccagggcgccgccgatgcgggcggccagcccccgcttttctccggctgccgcccggaatactgcccaggcgcagaccgccatgcatgctttgatcacaaaggtaccaggtgcatacagagggtatccgctgaccaggtcggccagcatagagccaagcccagccgccgcgccgccgtacattggacccagcacccacccggccagcaacaccacgcagtcccccaggttgacatagccccccgtggcaggcactgggatcttgacgatcatggtcatcacacaggtcagcgccgcaaacagcgccgcgtacaccagctttctcgttttttctccaatcatctcgttctacgctccttttgtcctgttcacaggaaaaatgtccttgcatttttccgctgtctgtattttaatcttatctggtctgatgaaaaggtccagtttcgttcttttttatcaggccagataggagggcaaccatgctcacatatgatctggaccggcgggggaccatcccccgctatgactacctctgccgctgcatccgggatgacatcctctgcggccgcctgaccgccgggagccggctcccctctcggcggagccttgcggagcacctgaaggtcagtgccgtcacggtggagagcgcctatgctcagctggccgcggagggatacatcgtttcccgggaaaagagcggctatttcgtctcccagctggagcccgccctgcgtcccccgtccccgccccccatccggaccgatgctccgcccccggggcagccctggatgatggatctgcggggaggcggcgggagcacagagctctttcccttctctgtctgggccaagctgatgcggcaggtactgtcccagcgtggtccagatctcctgcgtcccgtgccccacagcggggtccctgagctgcgggaggccatcgccggcaccctgtaccgcctgcggggcctctccgtctccccggagcagatcgtggtgggctcggggtccgaatatctgtataacctcatcgtacagctcctgggccgggagctggtctatggcgtggaggacccaggatacccaaagcccgccaggatctacgccctcaacggggcccgctgcatctccctcccggtggacggacaggggatctccccccagaccctcgctgcctccccggctcaggtggtccacctctccccctcccatcagtttcccaccggggccgtcaccccggcggggcggcgtcaggccctgctccgctgggccgcccagggcggggaccgctatctcatcgaggatgactacgacagcgaatttcgctttacagggcttcccatccctgccctccagagtatcgaccaggcggaccgggtcatctatttgaacaccttctcccgggctctggccccctccctgcgcatcagttatctggtgctgcctcccaccctgctggaccgctatcaccagcgcctggggttctactcctccaccgtccccgccctggagcagtacaccctggcctccttcctctcagaggggcgcttcgagcagcacctcagccgggcccggaaccgctaccgggccctccgtgaccaggtgctggaggccctggaggccagcggcctggccggccgggcccagatctccggtgcggacgcggggctccacttcctggtccggctggagacggagtgcggcgaccaggagctgacccagctggcccgtgcgcggggcatccgcctctccttcctgtcggagttctgcgcctcccccggcccggagcaccagcactttctggtcatcagctacccgggcatccagatggagcgcctgccccagaccctgagggagctggctgcgctactccactgagtccggggcgtaaaaactctttaggagggggcaagcaaaaaatctcactccgcccaatctcgataaatgataaaaagcgcaggagctggcgctcctgcgctttttgcagcgtcccttttcccgcctcatctgttacagcttctgctatgccgcctttcctgtaaaagagaaagctgttggtcccggtcccctgcaggggaccgggaccaacatggggatcagtcctccccgttgatgatccgctggtaattttcctggtcggtgtccccctcggtgctcaccaggagcacccgggaggactcgttcaggcccagcgcctgccgcacctctgacggggcgtctccccgcatcagggcatccagcaccccggctgtcactgcgccggactccccggacaccaccgccgggtcgccctcctccggccgggccagcagacgcattccccgggcggcgtatccgtccccgcaggacaggaaggcatccgcgtaggcatcgatgatcttccagctgatggtgcagggctctccgcagcacagacccgccatcatgctgtccatgtccccggtgacgaagtgcagcgccccgtcgtcggcctgggcggtgcggaacaggcagtcggcccggtctggctccacgatggcggtgaccggccgctcctccccccatacggaggtaaagaagcccagcgccgcaccggcgaagctgcccacccccgcctggagaaacagatgggtgggcctctccgccccctgctcctccagctgctggagggtctcggcggccaaagtggtatagccctgcatgatatgagcggggatctcctcatagcccggccaggctgtgtcctggatcaagatccagccgtgctcctccgccatccggttcgccaggcggaccgcgtcatcatagttatactcggtgatctccgcctgggcgccctgggcgcggatgttctccagccgctccgccgcgctccccttgggcatgtagaccaccgccttctggcccagcagccgggccgcccaggccactccgcggccgtggtttccgtcggtggcagtgacgaaggtgatgtcccccagcgcccggcgggcggcgggggcgcacagctcctcaaagctcatctcctccaagggcttccccagcttttccgacagacaccgggccatggcatagctcccgcccagcgccttgaaggcgttgaggccgaaccgcttggactcatccttgatccagatcttggacacgcccagactgtgggccaggccgtccagggataccagcggagtgggggcatagcctggcaggccgctgtggaagcggcgggccttctccgcctccccgggactggtcagggtcaggtcggccccgggacgctgcccccgcgggcgcaggacagatgcaaagtgttccatgcgattcactcctgttcgatctcattcccggcgtatcctcagggcgccggtctccccagcttttcgctgtattccgcccggaatgcctcaaagcgcccctcgtccagggcctgccggatgcgggccatcagctcgttatagaaatgcaggttgtgcatgacagccagccgcatggccagcatctcccccgccgccagcagatggcggacataggcccgggagaaggcggcacaggtggggcaggtgcaggcggggtcgatggggcggtcatccagcttatacttctcattcttgatgttgatggtgccctcccaggtgaagagcttgccgtggcgggcgttccgggcgggcatgacgcagtcgaagaagtcgatgccacgggccacgccctcgatgatgttggagggggtccccacccccatgaggtagcggggcttctcccggggcatatggggctccaccgcgtcgatgatgtcgtacatggtctgcgtgggctcccccaccgccagccccccgatggcgaagccgtcacagggcagctgggcgatctgctccatgtgccgcacccgcagctccgggtaggtcccgccttggttgatgccgaagagcatctgctggggattgacacagccgggctgccggttcagccgctggtgctccgccacgcagcgctccagccagcggtaggtccgggcacaggaggcctccacgtagtcgaagggggcggggttctcgatgcactcgtcaaaggccatggcgatgtcgctgcccagattagactggatctgcatggactcctccggtcccatgaagatccgacgtccgtcgatatgggaggcgaaggtgacgccctcctccgttatcttacgcaggccggacagagaaaagacctgaaatccgccgctgtcggtgaggatggggccatcccagtccataaaccggtgcagtccgcccagctgccgcaccaccccgtctcccggccgcaggtggaggtggtaggtgttggacagctcgatctgacagcccagcgtcttcaggtcgtgggaggagaccgcccccttgatggccccctgggtcccgacattcataaaaacaggggtctgggcagttccatgggcgcaggtgaacacgccacgcctggccctgccctccgtcttcaggatctgaaacacaaaaaaactcctttaccgtatcttgttccccgccggggcggggcctttgatccgccggaaaaagcccgcagctttctgtcagcccttttccctttcctgctctttgaagtccgcgatcagcatcgcgtctccgaaggagaaaaaccggtatcgctcccgcaccgcctcccggtaggcggccagcacgtgctcccggcctgccagggcggagaccagcatgatcagcgtagactccggcaggtggaaattggtgatcagcccgtccagcactttgaagcggtagccgggatagatgaaaatgttcgtccagccggcagactcctccatggtcccgtcctccgctgcaaagctctccaccgtgcggcaggaggtggtgcccacacagatcacccgccccccgttcttccgggtctcgttgatgatccgggcggtctccccggggaccatgcagtactcggagtgcatctcatggtcggtgatctcctcctccttcaccgggcggaaggtccccagccccacatggagcgtcacatagcacagcctgccccccatctcctccacctggcgcagcagctccggcgtgaagtgcaggccggcggtgggagcggcggcggaccccagcactttggagtagacggtctgataccgctcgttgtcctggagctccgccttgatataggggggcagaggcatccggcccagctcctccaggatctccagaaagatcccctggtagtggaagcggaccagccggttcccgccgggcagctccgcctccaccgtggcggtgagcttcccctccccgaaggagagctgagcgccgggcttcatcttccgccccggccggaccagacactcccacaggccctcccccctgtcgatgaggagcagcacttcgcaggcgccgccggtggaccggcggccgatcagccgggcgggcagtacccgggagtcgttgagcaccaggcagtcccctggtctcaaaaaccgggggagctcatagaaatggtggtggcccgtttcgcccgtgtacttgtccagcgtcagcaggcgggaagcatccctgcgctccagtggagtctgggcgatcagctcctccggcagttcaaaatcaaaatcagatgtcttcaatgtacttccttgtcctcttttctcttagtccagggcatcgacctcgacccccgggaaatagaattccacgatctcgtcgtagtcgaatccccgctccgccatggcgtaggcaccgtactgactcatgcccagctggtggccccagccggagccctggaatacatactggctgccgctcaccgtgacctcggtgcccgccacagcgcctgtgtctcctccggagctccccgtctgctctcccatccggtcgatggaccccgccccggagatgacatacaggtcatcccggtcctcccggctcagggctcctgttccgctgatggtgtagaggcggctcctgccgctcagcccttccccgctcaggctcccgccggagggggaaccgggctccgcctccgccccgttgatggtgaagcggatggagggcaggccgaacagattgcgcaggtcagtgctccgctggcggatggtgctgctctccccgttggtataattgaccttcacctggatcacgttgcccaggtccgagtaggtcagggtcagcgactccaccgaggcgttcacgcccccccatttctggagcaggctggtcagctccgaggccgtatagcgcacggtccaggaggagtaggaattcaggctggccacatcctgctcataggggtcctccaccccgcacaggtagggatatttctcccgggaggagccccagacgttgtacacgtcctcgctggccccgccgtggctggaggagtagaacgcctcgatcaccgtgccgtcatagagggcgtactcccccgctgtctcctccaccgcccggtcagtgcggtctgtggactgatagctgctgacgttggagccggccccccggtagacctggcagtccgtggaactgcacacgtcgaagtggtgggcgctgtgcttgttctgagagatgttgttgtaggcatagctcctggcgcagatggcctgggccttcagcgcctccaggggccagtcgttgctcatctcaaaggggatcacccccttgatgtaggtctccatgtccaccacgctgaccaccgtcaggtctccgccgccgatgcgctcatagcggaagccgccgtggtacttgtacccctggaaccaggtccgcacctcatcctcgccggtcacgtccggcatgatgcccagggccaggtcctctcccccgtcaaactggaacaggacccggtcggtccccgtctggatcactgtgacggcataggcgctggtccccacgacctccccttcgcccagctcatcggcggcgtccagggcgtcctccttggagaggtaggctcccacccggacctgatattccccgtcgatccaggccacgaagccgccgtcgtactcctctgcctcctccgccgcgtcgtcaaagcgccggaaggagtcgatgagcaggtggaagcagcccaccacagtgcccccgttgtccgagttggagtagatatattttccgctgctcctgtcatagtagaaccaggtgttctgggctttcagcacggtgatctgggtctctttctcgtcggtctcccccagctcctcgaaccgcaggtcctcgtcaaagtagccgaagcggtagccggagccgtagcccgtgttgttctccaggttggcccccaccagggcgccgctgccgtaggccaggcccacccggaccatctcctccccccgccgggccgccccggccgtggggacgcacaggacaaatgcaagagacagcgctaaaaatttcaacagtttttttctcatactgggctccatttctcacaaaagcgtcaacacgcaatttgttgacactgatttctcatcatgctatcatagatactaattaaaaataggagggaaacaggccggtcccgtcagatccctgtacttcttgtcgtctattatactgactccggccctgattggcaacctctgttttttcccttttccgcaaagtccaaatctgcggcacgagccgccatgaaaggaacctgaacatgaaaaagtacaaagtaggcatcatcggcggcaccggcatggtggggcagcgcttcgtcaccctgatggaggaccacccctggttccagctcaccgccatcgccgccagcccccgttccgccggcaagacctatgagcaggccgtctccggccgctgggccatgaagactcccatcccccagcaggccaaggacctggtggtgctggacgcctccgccgacgtggaaaagatcgccggcatggtagacttcgtcttctgtgccgtggatatgaagaaggaggagatccgcgccctggaggagacctacgccaaggccgaggtgccggtggtctccaacaactccgcccaccgctggaccgacgacgtgcccatggtggtgcccgagatgaacccggagcatctggcggtcatcccagcacagcgcgcccgcctgggcacccggcgcggcttcatcgccgtcaaatccaactgctccatccagtcctatgcccctgccctgcatcccctgatgcagttcggcatcgagaaggtcctggtttgcacctatcaggccatctccggtgcgggcaagacctttgagcgctggcccgagatggtggataatctgatcccctacatcggcggcgaggaggagaagagcgagcaggagcccctgaaggtctggggcaaggtggaggacggcaagatcgtcaaggccgccggacccgccatcactgcccagtgcctgcgggtccccgtctccgacggccacaccgccgccgtgttcgtcaccttccgcaataagccctctatggaggagatcagggagacctggaagaacttcaagggccgggcccaggagctggagctcccctccgcccccaagcagttcctccactattttgaggagcccgaccgtccccaggccagactggaccgggatctggagggcggcatggccatctccctgggccgtctgcgccccgatacccagtacgactacaagttcgtgggcctgtcccacaacaccctgcgcggcgccgccggcggcgcggtcctgctggccgagctgctgtgcgcggaagggtatatttaacggataactgagaaaaacatgacgcaggaagggccccgcctctgcggtccctttcgctgtctctccatccgaagcgcttttacggccgtcaattcctctgagtgaaggggcgcagagacgtcccctgcatgggccgcctccgtgttccacgcttcactcttccactctcaatcagaagggatgctgttttatgagaacacccgtatttaccggctcctgccccgccctggctacaccctttgaccagaacggcaatatcaactacgacgccttcggcaagctgatcgacgcccagatcgccgccggcgtggatgcggtctgcgtgtgcggtaccaccggcgagtcagccaccatgtccatccgggagcacatcgccgcggtggaattctgcgtcaagcgggtggaccaccgggtcaaagtcatcgccggcacgggcagcaacgacacctccgccgccgtctacctgtcccagcacgcccaggactccggcgccgacgcctgcctgctggtgaccccctactacaacaaggccagccagaccggcctcatcaagcactatgagtacatcgcggagcgcatcgagctgcccatgatcctctacaacgtgcccagccgcaccggggtctcctttaccgccgagtcctacaaggtgctggctcagaatcccaagatcaacggcgtgaaggaggcctccggcaacttctccctgctggcccacacccggttcctctgccccgatgacttctacatctggtccggcaacgacgaccaggtggtccctatgatgtccctgggtgccaagggggtcatctcggtggccagcaacatcatccccgaggtcatggtcaagatgtcccacctgtgcctggagggacagtttgaggatgcctccaagcttcagatcgcctatatggacctgatcgacgccctgttcatcgaggtcaaccccatccccatcaaggcagccatgaacctgatgggcatggaggccggttccctgcgtctgcccctgtgcgacatctcccacaagaatctggagacgctgcgccaggccatgggccgcatgggcctgctgtaaggagccgccatgcaaaagatcatcatctccggatgcagcggccacatgggccgggtggtggagtccctgtgcgccgccgacccccaggtgcaggtggcggccggcttcgatatcctgggctcctccgaccgggactttcccgtcttctcctcccctgcccagttcagcggggaggcggacgcggtcatcgacttctcctcccccgccgccctggatggcctgctggacttcgcccgggccaccgggacccctctggtgctggccaccaccggctacacccctgagcaggtggcccaaatcggcgccgctgccctggaggtgcccattttccgctccgccaacatgtccctggggatcaatgtactgctggagctggtgaaaaaggcggcctctgtgctgggggacagctatgacatcgagatcgtggagcgccatcaccgccggaaggtggacgctcccagcggcactgccctgatgatcgccgacgcggcggcgggggcctgcggccacgagacggagtacgtcttcgagcgccacagcgtccgccatccccgtgacaagaaggagatcggcatctccgcggtccggggcggcaccatcgtgggggagcacgagatcatctttgccggccacgacgaggtcatggagatccgccacactgccctctcccgggagatcttcgcccagggcgccgtggaggcggccaagtttatggccggtgtgaaggcacccggcctgtacgatatgagcagcctcatccggtaagtcagaaaaaacagccttccactccggtggaaggttgttttttgcgcttttttctgttatgctggtcttgtacctcaggcctttggaggaaggaggcaggatatggctgtcgctgcggcagtactggccgccctgtgcatcagtttgatcatcttccatctgcacaaccttcaggactcctccagaggggagcctgtccgggccgaagaggcccgggtccacgccaaggagaactgccactcccgcgctggctcctcctactacctctatttccatgtcccctgccgggacactgtggtgacctgccaggtcccgccggacatctggtactatctctccaagggggaccggggcaccctgtgccatcagggcgggcggttcatctccttcacccgggacggggagctgatcgccgtggacccggtggcggagcggcatcagctgtggcggatacacggctcgtaacactaagatcctgttgctatttccctgtattttgggtataatagtgctgagctcttccggcacatcccggccggaaaatcacgggctccccattgcaaaggaggcagcatcctatgaagttctacatctgtgagcactgcgggaatatcgtcacctttctccagtccagcggcgtgcccgtcatgtgctgcgggcagaagatgaccgaactcgtccccgattccaccgacgcggctcaggagaagcatgtccctgtggtcaccgtagagggcagcatggtggatgtcaaggtgggctccgccccccatcccatgatccccgagcactatatccagtgggtggccctggagaccaccgagggctgtcaaatcaaatacctggagccaggtcaggccccggaggtcaaatttgccctcgcccccggcgaccgggtcaaggccgcttacgcctattgcaatcttcacgggctctggagagcctgagcgacaccatgaccagaagccccctctgccggctcttccggcggagggggctctttctccgttatggcttcccttccgtcacctgctggtagcggtaaaggaactggatggtctcctcccgggtggtgaagtcccgatagcgcatcccagcgctgtccccggagaccagtccggcctcctccgcccagcggcgggcgttctcagaccagtcagagggcttctctcggcctctgcgggccagataatccgccatcatggcatcaaactgttcctgtgtcaccgtctcctctcctcctctcatcgcatccctcacggcccgcctgaagtcatccatggtcttcccgtgcagcggccaccactggcccacatcgctgtggttgctggcgatccccagggcgtggccgccggcgtggtccaggatcacgcccggctccatggggtccaggcggtactggcggcacagcatggcggacagctccacggcgttgcggtagatgtcctgaaaatatgcctcgttcttctccacatcatagcccaccatctttccgttctgataggtgtgcccggctggctcacagcactcaaaggagatgtgggtattgttggcgctgccgttttttcccgagcctgcgtgccagccccgccagttccagggcagggtctggatgacctcatcccgggccacgaaggcgtggacgcacacctccaccccgggcttgttccagcggcggatgaacacctgcgggtccggctgcgccacgccggtggagtggaccatgatccccttgggtacgatcttccgcccggcctggtaacagtcattctctgtcaggaactcctgactcagcttcagttccatggctccctcctctgtccatacaaaggctgttccatcctatgccgcctccttttctattgacaccctctcccaactcctctaaaatagaaaggtcaaaagagaaagaaaaagggggtcccttcctatgggagaactcaatccggcgcagaagcggggcaatgccgccgccctgctccccatcctggtgttcctggtcctctatttgggctgcggcctgctgttcgagtatgggctcaagatcgagatgggcttctatcagaccccggccatcgtggccttcctcatcgccctgttcgtagcctgcgtccagaaccgggccctggacttcaacgccaagctgaaggtaatggccaacggggtggcggatgagaacatcctcaccatgtgcctggtctttctggccgcaggcgccttttccggcgcggtccaggccgccggcggcgccgacagcacggtctatctgttcctggactacctgcccagccagttcgcggtggcgggcctgttcttgatctcctgcttcgtgtccatctccatgggcacctcggtgggcaccatctccgccctggcccccttcgccgtctccatgagcgaagccaccggcttcgaggtggtcctgtgcatcgcggcggtggcctcgggcgccatgttcggtgacaacctctccatgatctccgacaccaccatcgccgcggtccgcacccagggctgtgaaatgaaggacaagttccgcatgaacttcttcatcgtcctgcctgcagccatcctcaccctggtgatcttcatcgccctcacctggggcggcagcggccagccggagatcggcacatacagcgtctggaaggtcctgccctatctggtggtcctggtgggggccgtggccggcgtcaacgtgttcctgatcctgaccatcggcgctgtgctgagcctgatcgtgggcgtggcctccggcgcctttccctggacccagatcttctctgtgatggggacgggcatcaccgccatgtatgacatcactgtcatctccatcgtcgtggcctgtatcggcgccctggtgcgggaatatggcggcatccagtggctcatcgacttcgtccaccgccgcgccaactccaagcggggtgcccagctgggcatcgccggactggtggccgcggtggatgtagccaccgccaataacacagttgccatcgtgatgaccggctccatcgctaaggacatcagccaggagtaccacatcgacccccggcgatccgcctccctcctggatatctttgcctcggtgatgcagggcatcctgccctatggtgcgcagctgctctacgcctccgcagggacgggggtctctgccgtcaagattatgccctacatgttctactgctatcttatggcggtgtgtgccctggtcttcatcctcttctggccagaccggaagcggaagtgatccctaaaaaagaaaggccggcggctctgggtctcctcccagagccgccggttttttacttgctgcatggccggtccttctgtccggactcccaccgctccccggtgtagagatatttcttgatggcaaagatcccggccaccgcccccacgctcatcagcgtctgcatgggttcctcatggctgatgatcatctgccgggcgatggcgaacagcagcacatcgatcaccgccccgtaggtatgcagcatcagcatctttacaaactcgatccccatgacgatgaggaacgcatttgccataaatgcgtcaatggagaaggactcccactggcagcagaacttctccaccgagccgcagatcagcagtgcaatgctggccaggatcgcccccaggatggtgatcgccatcacgatctccatcgccatggtaaacttcagcagtcttgtccttacttttgttctcatacggccctcccgcagcacgattttatgtaagaccagtatatgggatagccatctggtccgtcaatcatttccccatcttttttacagtaaaaaggacgggcggagaggtgggagatgactccccctctccgcccgcttccggatctattttccgtggatcaccgctgcgtacagtgtgttcttcatcagcatggcccgggtcagcggcccaacgccccccggaaccggggtgatgtacgacgcccgtccggccgcctcctcaaataccacgtcgccgcacagggtcccgtccgcccggcggttcactgccacatccaccaccacggccccctccttcaccatgtctccagtgatgaggccggcctgtccagcggcggagatcaggatgtccgcccggctgcactcctttttcaggtactccgtcttggtgtggcagatggtgaccgtggcgttctcccgcagcatcagcatagccagcggcttgcccacgatattggagcgccccacgatcacgcagcttttccccgacagctccacgccgtattccgcgagcagacgcatcacgctggccggggtgcagggataaaagcccttctccccgatcatcagctcccccacgttgaaggggtggaagcagtccacatccttgtcgggcctgaccacagacaggaccgcccgctcattcaaatgggccggcaggggcagctggatcaggatgccgtcgatgtcgctgcgtccgttcagcgtttcaatgagcagcatcagctcctcctgtcctgtctccgccggcaggatgtattcctcactgtatatcccgcactgggcacagtcccgcttctttccatccgcgtagacctggctggcggggtcgtcccctaccaggatcacggccaggccggggcggcgctccatccgcgccgccgccgcccggacctcctccttcaccttttttgccagtgcctttccgtccatgatgaccgccgacacaaatcagtcctcctttttctccggtccgcccgggccctctccagcgtccgccctgtgggcggccagccggttcacataaagctcagacggatcgtgccgacggaacttcagctcatagatcaatacaacagccgccacggcggcagagacgatggccagcacctgggaggtgcggatgggggcgccgaacagctccagtccgaagaaatacaggctgtccgtccgcaggccctcgatccagaaccggcccaggccgtaccacagcacatagctccagaacacctggccatcaaatttcttccagtgctttccgatccagtagatcagaaagatgcccacaaaattccacagggactcgtagaaaaacgtagggtgcacccccagggtgccgtccaggatggcctgatagccgtccgcgtccaccagtccctgggacagcagggagctggcgatgctctccgaacacatccgccagggaagtccggtgacgccgccgtaggcctccacattcataaagtttccccaccggccgatgcactggccgatcagaaggccgtggacccccaggtctgcaaaggagaagaagctgatcttccggatacggcagaacacgatcaaggtcagggcggcggcaatgatgccgccgtagatggccaggccgccgtccgtgatgcggaagatggccccccagttcagggaaccgtccgcctcccggtacaggtccagatagaagagtacgtaatagacccgcagccccaccacggagaggggcaccgcgaagatcagcaggtccatgatctggtcgctgttcacgccgaatctgggcgcccaccggcagcacagcaggacggccagcagaaatccgcagccgatgatgaccccgtaccagtacaccgggtggccaaacaacgagaaggccacccggtcaaggtggaactccagccccagtccgggaaatgtcacgatgttggtcattccaccgcttcctctctgggccggaccacggacagggcggtgcgctccggcgtgacccagcgggcgatcatggcctgggcgtcctccctggtcaggctgtcgtacacctccgggaagcgcaggaaatcgcagccctggaaaaacgactgggcctgactgatgcagatgtgctcaaaggagttcagcgcccgcactcggtttccgtaggaggattttttcagccgctcccacagctcggggtcgatcccctcccgtgcgatccgctccgcctcggcggccaccgccgcccgcactccctccgggtccttgctctcccccccggcacacaggaaagcgcagccggggtagctctcatacccgtaggagaaattccggttgaccagcccctcccggtagagtctggcatacagcgggccggagttgcccagaagtgcctcacaggccagctcgcccagcagctgctggcgcagggccccctctccctccggggccgcctcccccttgaatcccagctggaacagggggaccgagacctccatctcccgctggatcatgggctggcacacctccgcgggctcctgggcgccgtagtccccccgggcaaccggcgcgccgggccgctccggcaggatctcccgagccgcctggcagatcttctccgggtccacgtcccctgccacgcacagcaccatattggaggggtcgtagaatgccttgtggcaggcgtagagggtctcagcggtgatgtgggagatggactccgccgagcccgccaccgacacccgcaccgggtgcttctcgtagagggcctgcatcagatccataaagaccacccagtccgggtcgtcctcgatcatgccgatctcctgaccgatgatcccctgctccttgtccacgctctccttggtgaaatagggaatggagacgaaggagagcaggatgcgcaggttctcctcgaatttctctgtgctctcgaaatagtagcctgtgatggcgttgctggtgaaggcattgggggaggcgccgttggccgccagctcctggagggcgttgccctccttggtgtcgaacatcttgtgctccagatagtgggccacccccgccggagtgtccatatcctggccatccagcttgaacttcatatccatgcctccgtaattggtggcaaaaaaggcgtagctcttctgaaagccgggcttgggcaccacaaagatatgcagcccgttgtccagcacctggtggtacatctgctcccccacccggggaaattccagtttctccatggttcagccctccgttcccttcaggaagtaaatggtgtccagttccagcttctgagccgcctgggccacctgctcccgggtgacctgctccagctgggccaccagctcctcgatgccggtctccagaccggcggccgtctggcccagccagaagtcctcctgccggtcctggacatccagggtggccaggtgggcgccgatcatggtgcggcgggtcccctccagctcccagtcctccatgttcccctgccggatctcctccagctgatggaggatctcgtccctggcctgctggaacttgtcaaattcgatcccggaggagaccaggatcagccccttcatcttctccagggtggagctggcgtagtagcacagagacagcttctcccgcacgttcataaagagcttggacagggtagtgccgccgaatacggcgttgcacatggccatggcggggtattcctcctcccagcaggtgacgccgccggtgcggaagcccatggccagcttgccctgggtcacgtccatggactcctccaccatgctgggctccggtccggcgtggagccggacctcgcagtccgggcagatccgcccctcattcacggggagggcggacagtgcctccttcagggcgcgggccacccgctcctcctccgcggaaccgcagtagtacagctcgatctgggcggtggagagcagctgctgataccgctcccacagagagcccggcgtgacggccgcggcatgctccacatcccccagcttgtccaccccgaaggcctcctccccgcacatcagctgtcccaggcgcagggtggcgtaggagcgcttgtcgttgatctggccccggatgcggtccaccagattggcccgttccccggacacatattcctccgcaaaaatgccgtcctgaaggcgggggcggagcagcagctcccccagcagccccgccgcgggctccaggatgggctcgcccccgggcgcaaaggcatcatccagaaagctggccacaaagcccaggcactgggtctccccctttttccgcacgatgggctcgatggcgcctccgtacagctcgtccagggcggcggagagggactccatatccgggtgctcccgggtcccccggcgcagcaccgggaagagcagggcattggccgccgcccgctcccgctccagggggaccagcatggtcaggctgagatagctgcttttgaatttgtcggtgtggactgtccgcagccacaccccgggaaagagctcccggcgcgttacttgagtcatagatcagattcctttctctgcacgaaagggggcgtcccccttttcctgtggcctttcagaagggaatttccttcctggaagcagaacagagttatcataccacatctttcgccgaaaagcaaagctttccattcccgggtaccgctgtcacttccagccggtggtcccctgtcagttcccggagggggacgccgtcccggatctcccggccgtccagccggacggagagctctctcccccggctcacctggatgctcagccgcccccggtccagttcccactccccggtccagcccggccagtcctccggcaggtggggctccacaaacaagcggccttcccggaccttcaggcccagcagctcctccaccgcggtgcggtagtaccaccccgccgccccggtgtaccagctccagccgccccggcccaggtgccccggggccgcatagacatcggcggccagcacatagggctccgcctgatagatctgcgtccggcggcgctccggcaggagggcccgcagcagctccagcccatcctccgtccggcccaggcggaggcaggccagagccagccacacagccccatgggtgtactgtcccccgttctcccgcacgccgggcagatagcccttgatatagcccgggtccgggcccctgtcctggaagggcggatcgaacagcttcactaccccggcctggggcagatagagccgctccagcgcggcagacactgcctggcaggcccgctcccggtccgagtcctccaccagcgcggcgaaggactgggcaatggagtcgatctcgcagctctccgccccccgggtccccaggggggccccgctgtcaaaatagccccggcggtaccagctcccgtcccaagccgcctccgcggccttccggtatccctccgcccggcccagcagctcctccgccagctgcggctcctccatatgccggcacaccggcgcgaacttccgaagcaccagggcgaggaaccaggtcagccacacagactccccccggcctcccgcccccacgcggttcatgccgtcgttccagtctccgcctcctatcagggccaggccgtggctgcccgcaccgcgctccatggcgcaccggatggccgccagggcatggcggtagaccgtgtcctctcgctccgaacaccggggcgtctcataccgctcccgctccccctcccgcaggggcggggattccagatagcaggtcttctccccgcacacggaccagtcccccgtcacctccagatattccgccagcacataaggcagccacagcaggtcgtcggtgatccgggtccggacccccgccccatggggcggatgccaccagtgctgcacgtctccctccggaaattggcgggaggaggccagcaccagctgttcccgggcccgctccggcacagtgagcagcagggcccgcacgtcttggagctggtcccggaagccgtaggctccgccattctgatactgagacgtgcgggccatcagccggcaggccagcacctgatagagcgcccagccgttgagataccggtccagcgccggctccggggtggagaagcgcagggcggacacctttttccgccagtccagcacgacctgctccccctctgcctccgcccgttccggcgggagggcgtcccagcggtggaccagcccgccccgttcccccggcgcgctcaccaggacggccggcagtccctccgccaccgggcaggcggacgcctctccatctctcctttggatggacagcgtcccagcacctccggagagcgcgaaacggagcacccgctccggccggtccgggggcacatgtccctccgtcaccagcagggtctccccaaaccgcttctcccagcgggcaaagccggggccgtaggtcactgtacagggcaggccatccccgtccgcgaagacggaggcgcagatgccccctgtctccagcagcagccgctcctccccgcccacggccagcgggtcgtttttccagcgggtgaggcggccctcgtgggcattctccctccagagcaggccgttgcctgtctcgtcggtcagccatccgaagctctctccgcacaggatctgactccagcccacagggggcaggcgctccccggcgcggatgaccacgctgcccgcctggtcaaagtgccagggggcgggctccgggcggaccgacaccgccggcggaggcgtccagtgctccggctcttcctccatcagttccaggggcaggcgggcggaggcccaggccagcacggtgggaaatccctccccgtggtccaccaggtggaccccgccccgggccccaagggcggattccgcccccagcgcccgcagcgcctccctgaccgcagtaagcaggggacggcggtagtcgcccccctcctccgccagaaacaccaagtcaaacggccagccggcccgggtgaggaaccgatgctgggcacaccacagcccgatcttatcctctcccactcctccctccagcggcgcagccgcgatgggcagatccccggagatcccgaactgccacagctcacactggggcggacgcccctccgctccgggccggacggaggccagatggcgcagcaaagcaaaggcccccagggcctggacctggtccagccccagccgctgggcaatgggggccagcatcccgcccggctcctcccgcccctccagcagccgctgggcggtgtcggcggcggcatccagccggtccgagacccccaatgccaggcgcagggcgcagctctcccccggccgcaggcgcaccggcaggcgcaccatcaggcacgggtccagcaccgctcccgtctcccccttcaggggcccgggccccccgccagccagtgcccgcaggccgccccgccccagggccgcctgccgtgaggtggtgaatgtgctcccctccccgtcccacagggccgccagcaccgggtgctcctccgctcccctggggcggcggcggaaggagacgccgccggggatggcgcggctctccacaaacagcttggagaaggcggggtgggccaggtgatcccgctccccgcacagcacgggttccagataacacagaagctctccctccagcacgccctctccgtcccagtgcagctccgcccggcgcagctccccgctgcccagccgggccagggcgaggccggtgcgggcggtcaggccgccccgctgacaggtccagacggccccgccgtcatagaactcccagctgtaccggcagtctccgcggtacaggggggcggcggtcaggccgatcaccccctccgccccggagaagaaccaggacaccccggcaggggcctggtactcccccggctccgccagggtgatgacatcccgccccaggctggagcgggtctgtccgttatcggcggcaaagacgcagtatcccccctcggacaccaggtggcaccgtggtgagagacgacccgccccctccccggtccgcagcagatcgggcccctggcggcggcgggggcgctccggcgccgccccgtcccggcggcgcatgacaggcgctcccaccgggacccgctcctggagcagctcccggtaggcggccatggtccggtcggacaggaagcgccgctgcatcacgtcctccgtcagggcgttgtcgatggccaccaggctcatgcccaggtggtgggccatataggatcggacgatctcaaagttgctgccccctgacaggcgggagggggtgaagtcggccgcctcatagaggccgaaccgcccctccagccccagggcgcacagccggcgcaggttacgcaccgcgcttttgggggccatggggagggcgaggaaggaggcgtagggcgccaccaccagctcctggtccagcccccgcttcagacccagggcctgaacgccgtgggccttgtactgataagtcatccccgggtcaaaggcgaaaaatcccgattccgagatcccccagggggtgtgggtcctggccccccggcgcttctgggcatagacgcagaaggccagcgactcgtacatcaaggagttctcctcacagggcagcagcagattgggcatgaaatattcaaacatggtcccggtccaggaggccatgccgctgtaatcgttgtcccccagcagcatccggctcagccggcgccagtgccggggcgggacctctccccgggccacggtcacgtagctggtctgccgggcctcgctggccatcaggtcatagtggccgggggtgggacggtcccgctccgcctcccagccgatgaaaaacagcctgccgtcggggtcgtacagggggcggaattccatggcgccggacagcgcccgggcccgggcggccagctccccctctccccactcctccagtcccgccgccagggcgatcagactgccgcacaggttcccgctgtccacggtggagatataccggggggccatgggcctggcagagacagtgtcataccagttgtagaggtggccccgccacttctccagcccctccacggtgttcaggacatggcggatcagccccgccccctggtcctggggcagcaggtccagatccaccgccgccatcacggagagcagggccagcccgatattggtgggggaggtccggcgggccagccccgccgccggcttctcctgccagttgtccggcgggagccagtggtcctcctcccggaggaagctggcaaagtagcgccagatcagggtggcctggtggagcaggaaggcccggtcccccggggccagtcccgcccgctttccactgggccggctgatccaccaggcggcggcgggagccgccatccacagcagccccgccaggctgccgatccgcagctccgccagcagaaaggtggccagccctacggcgggggaaaaccactcccgccggtaataggaccacagaccgttgccgccgccccgctccgactggtctgccgtcacccaggccagcaggtcccggcctgtcacccccatccgccacagcgcggtgcacacggcgcaggcggacacccaggcgtggtagggcaggaacagcagctggagggcggtctggagcagggctccgggcaggccggccaccaccgtggagtggtagcgtccccgggcccgcccgccccgccgggcggccaggtccatcccggacaggagcagattggaggcggcagagaggatagcggcgccgccagcggcagccagagctgccccgctcccgcagatccccagcaccagggctgccagggtaaagatgggggagagagagcggcgcaggttgtccagcagcttccaccgtgccagtgggggcaggggatttttctcacgccctcccctgccgtccggcacccgggggagcagccacggcagcagctgccagtcccccctgatccagcggttcaggcgggcgtagtaggaacgcacctgatagggaaatccgtctgtgagctccacctcccccagcagtccggcccggaggtaggagccctccagcaggtcatgggacagtacccgcccctccggcacccggcggtccagacaggcatagaaggcgtccacctggaagatgccctttcccgtataggtcccctggtcaaacaggtcgtggtacacgtcgctggccgcgctgccataggggtccactccccccagcccggcaaacacccgggagaacagggagcggttggcggcggccagctccaccgccactctgggctggagcagggcgtacccctccgtgaccacccggcgctcccggtccacctccggctgattcaggggatggagcattgcccccaccagctcccgggccgcgcccacgttcaggctggtatcgctgtccagagtgatgacatagcgggtgtccgccagggccccccggtctccggagagcacctccagcccgctggggcggtccttcaacagccgcaccagctccaccagcgcgccccgcttccgttcccagcccatccagcgcccatcccgggcactgtaacggggttcccggaaaaagaggtagaagccgcccccgtacttccggttcaggcggtccacctccttccgggcctctcggacccagctccgcccctccgcccccatgggggaatcccggtcgggcagatcggccagcatccccagccgcagctctccgccgctgtcccggttggccagatggtagcgctccagcttttctgccagctcacggccgctctcctttccggtcagcagggccgcgatgacgcagagggtcctcccctccggcgggatgccggactccagcgccatgcggtggaccgggcgcgggggcaccagacggaccagaagaaagtccgcgctgtttttcaccagatcggacagggggaaaaagagcagcagcccccccacccagctgtccagcagcagagccagagcggcggagagcagggcggcagagagcaggaccagcgggccgtagcacgccccggaccgtgtccttttctccgcccccagcgggcggcggaagaggaaccagcccacgtggcgctccgcccccgccccctgccgggacagctccaggacccgccgggccgtctcctcctcccccatgccgctctttctcgccagacggcacacctgtccccggtatctccggcgtgtggcgtcctccatggagccataacatcccgccgggtcctggcgcaggacagcctccacccggctctccgactccagcagcgccccccagtccccatcggacagggcccgcagcccggcaaagacagactcaaagggggcgggccctgtctgctcctcctgcagcgccgccaggtccccgcacagaccacgcagctgacacagcagcgcccaggtcagggcggggaccagcagggacagctcccgttcggtgaggggcagtacggactggaacgcggagagaaagaccgtcaggcggcggcggtccaggtcggggaccgcccaaagcgccgtccgggcggcacactggagaacagactggccgttccggcagcgccgcaggggcctgcccctgcggaaggcccgctccgccatccgcccctcccgcgccgccagataggcgttgtccagcagccactccaccgctcccggcgtgcgcccgctctcctcggcccagcgggccagctcctgccgggcgcgctccacctcagccagcgcgcgccgcatctcccgggccacagtccccgggcggaccgctccctccagctccagtgcccgggcggcgttggccccgtatcgggacagatggggttcatccatgggaacatgggcggtgttcgaagcagacatggcggctcctcctgaatcatcataccgttttttgggcgatcattatggattttgccccggtgccgtgggaatatacccccgccaagtgtacagatttttcacttgacaagggggctctgttatggtatgattccgaatgtaaagtttttgagctttacgacatctcaacaggaggtggaacagtttgaaaagtcaggcctatcgcatggccctgctgtacgatttttacggcgacgtgctcaccgagcggcagaaggagttttacgacctctactataacgaggatctttcactctccgagatcgcggagaacagcggcatcacccgccagggcgtccgggacgtgatcgtccgggccgaggccatcctcaccgatctggaggataagaccggcctgatcaagcggttccacgccatgcacaagcagctccagcagatcgctgaggacgcggaaaagatcctggagcgcaacggcagctatgacgacccagacatcgaggcggcggcccgggagatccgggagctggcccaggtgcttcaaaaggagtaaccatggcgtttgaaggactttctgaaaagctctccgccgcattcaaaaagctgcggggcaagggccgtctctccgaggccgacgtcaaggaggctatgcgggagatccgcctggccctgctggaggcggacgtcagctacaaggtggtcaagcagttcatcgctcaggtgaccgagcgggccgtgggctccgacgtgctggaggccctctcccccgcccagacgatcatcaagatcgtcaacgaggagcttaccgccctgatgggcggcaccagcaccaagctggagatctcctccaagccccccacggtggtgatgctggtgggccttcagggtgcgggcaagaccaccaacggcgccaagctggccggcctgatgaaacgtcagaacggcaagcggcccctgctggccgcctgcgatatctaccgccccgccgccatcaagcagctggaggtggtgggcggacagctggacatcccggtgttccagatgggtcagaccgacccggtggacatcgccagagccgccatcgagcacgccaggcagcacggcaacgacatggttttcctggacaccgccggccggctccatgtggacgaggagctgatggacgagctcaagcgcatcaaggccgccgtggagcccacggagatcctgctggtggtggacgccatgatcggccaggacgcagtgaacgcggccaaggcctttgacgacgcactggacatcgacggcgtcatgctcaccaagctggacggagacgcccggggcggcgcagccctctccattaaggcagtcaccggcaagcccatcaagttcgtgggtgtgggggaaaagctggaccagatcgagatcttccaccctgaccggatggccagccgtatcctgggcatgggcgacatgctctctctcatcgagaaggcggagcagaacttcgacaggcagaaggccctggagttccaggagaagctgcggaaaaacaaattcacgctgaccgatttctatgagcagatggctcagctgaagaatatgggctccctgtccgagatcgccgggatgctccccggtgtcaaggcctccgatctggagggggcctccatggacgagtccctgctggggcggatggaggccatcatcctttccatgaccccctatgagcgggaaaatcccaatgtgctcaactccagccgcaagcggcgcatcgccgccgggtccggcacccaggtggtggacatcaaccggctgctgaagcagttcgagatgatgcaggccatgaccaagcagttcgccggcggcaagatgcccaagtccatgcgccgcctgatgggcaaaaagggcggcaagggcatgctgggcggcaagatgcccggcctccccttctgactccccgacggcggaaaggagcacggaccatgaaaaagtggacctttttcgatcagatgcttgccagcttcctggtcatcgttatctcgtccatcctgtcagccctgctccatctccccattgtgggccgtctggcctttcttctggtgggggccggcttcgttctccacccggtggtcccggtaaacatctccatccagtggggagcgcgggccctatggttcccccgcctgctgggggcatcctttctcctgttcgggctgctggcccaattttgaacgctggcaaacacttcggtgttttccatatacgcaagaaatttttggaggtgaatataaatggttaaaatcagactgcgccgcatgggcgcgaagaaggctcccttctaccgtatcgtggtggcggattcccgctatccccgtgacggccgtttcatcgaggagatcggcacctacaaccctctgaccacccccgccgagctgaaggtggacgccgagcgggctcaggcctggatcaagaccggtgctcagcccaccgacaccgttcgctcccttctgaaaaaggccggcgcgctgtaaggctggaggtctgtcaggcaaatgaaagagcttttgacctatgtcgcccagaatctggtggaccaccccgatcaggtgtctgtcacccagcatgagagcgacggcgagaccgtgctggagctccgtgtggctccggaggatatggggaaggtgatcggccgtcagggccgcatcgccaaggagatccgcaccctgatccgctccgtggcccagcgcaccggtcagcgtgtctccgtcgagatcgtcgactagacagttatggcgcagggagatcctgcgccattgtcttaccccggaggaaaggagaatccccatgaaagaacagtatctggaggtcggaaagatcaccaacgtccacggcattatgggcgaggtgcgggtacagccctgggcggactccccggactttctctgccagttcaagaccctctatgtggacagctcccactggcccatccaggtggagcgggcccgggtccacaaaaacatggtcatcctgaagctgcagggcgtcaccgatgtcaacagtgctctggccatgcgcaacgccgtgctgtacatcgaccggaaggatgtccagctcccggagggcagctttttcctggctgacctgatgggaatggaggtccgggacgccgccagcggcgcggtgctgggacagattgcggacatcctcaccctgcccgccaacaatgtgtatgtagtccgcggcggcgcccgggagctgatgatccccgcggtggaccagttcatcgcggaggtcaacgtggacgagggatacctccgggtcaacatgatggagggcctgtgatgcgccgcaccgtcctctacatctccatgagcctggacggctgcctggcccgcccggacggggatgtctcctggctggccggccaggaccctgatgacccggacccggggacctaccccgcctttctctccacagtggacaccgtggtcatgggctggaccacctaccaccaggtggtcacccagctctctcccggcagctggccctaccggggattggactgctatgtgctcacccaccgccccctccctccccagacggagaagatccaggctttcagcggtccggcccaccagttggtggaacagctgaagcgggagcccgccgggcgggacatctggatctgcggcggcgccgacacggccgcccagctgatccggaaaaacgccatcgaccggtatgtggtctctgtgatccccgtgatcctgggggagggcatccccctcttttcccgcgggctgccccagcaggacctgcgtctggtctccgccgcccacagcaacgggatcgccgagctggcctatgaaccccgctgacccgccgctagccccgcctgtatgaaacgcaggcggggttttccgtttcctgtacaggggcggggagccgccccgcccctgatcggactcagcggagtgttgattggaccggcaggggacaccaccctcatccgtcgcggcatccgccgtgacaccttccccacccaggggggaaggctttgagggcagctccgggggctgcccctgcgagatatcttcggcttttgcgcaggggcgcacatcgtgcgcccgccgtccggctcgatgagggcatcaggccctgtccgctcccgcggagccgctctctttcccggccgggaattgaccccggccggccccggtgctataataaaccatcacacatgcagggggacttgcccccggaacaggagatacctatgggaatgaagaccagcgccgtctgggcagacggcacctttgagagcaacaccgcccccctgatggggcctttggaggactgcgcccgccgggcggcggagctgggctatgacgccctctccctgacggtcaaccgccccggcgagctggatgccgcctatgtccgccgcgtgctgggagagtacggcctgaccgcatcgggactggctacgggacggatctacaccgtagacggcctgggcctgggcctggcggaccaggagcggcgccaggccgcggtggaccggatgctgtcccacgcggagctgtgtgcccagctggggggcgccaagctgatcgtaggcgccatccggggctggacccgggatgccggcggccgcgaggcctatgagcctctgttccgctccagcatggagtccatcctggcccgcgcggaacagctgggcatccaggtggccttcgaggccatcagccgcatcgactccgacgcctactgctccctgtccgagaccgcggagttcatccgctccttccgctcccctgccctccggctccaggtggactccatccatctccacaccaacggggagacggatttctaccaagggctgctgaaggcgggcgacctcatcggacaggtggacatctccgatgtggaccgcatggccccagacggcaggcactttgattttccgctgttgatccaggccctgaaggagaccggattccaggactatctggtctttgagttccgtgccaatccccctgccgacgcggccaaggccgggctggactacatccgcgctctgctgtgaacgggcccagtttgttccgctgccccctgtgcggcagccctctgacgcaggaggagaggggctgcatctgtcccgcccgccacagctttgatcgggcggcggcgggttacgtccacctcctgccccccaaccggatgcactccaaggcgccgggggacgaccgggagatggtggccgcccgggccgcttttctggagcgcggctactacgccccgctgcgccaggccctggaggagctggtcctggaggcttccgcccacctggagggccccgtcctgctggacagcggctgtggggagggctactacacagcggggatgttccgggcgctggagcgggccggacaccggccccgggcagcggggatcgatatctccaaatacgccctgcgccgggccgccaagcggcttccggagggggaattcgcagtggcctccgcctaccgcctgcccctggcggacgcctcggcggacctgctgaccaatgtgttctcccccctgtccgcggaggagttcgccagggtcctgcggccgggcggcaccttcctctatgtggtcccctccgcccggcacctctgggagatgaagcaggtcctctattcccagccctacgaaaaccccgtcaaggaaactccctatacaggcttttcctatcagcgcatcgtcccggtgcggtatgagatcactctggactgcccggaggacatccgggccctgttccagatgaccccctactgctggaagactccccgggagggggtggaggccctgtccgctctgaagcggctcaccacccaggtgggctttgacctccacgtgttccgccgcagccccgcctgatctctcccgccgccccataaaatatgcccggaggcacgtgtgcctccgggcatcctgcatttatgccgcctgctccggctgctccagccccaggttctcccgcacctggcggcggaactccgtcagctccgggtagtccaggaaaaaccgcagcttctccgcccacaccgcctccgactccggcacgtcccacagcacgaagaaggcgaagctctcgctgatgtcctccgacgggtcggtggaggcgtagctgctgacgaaatcctcctcatgccgcaggaagaagttatagctgtccagatccgccagccggtcatccaggtagccggtccagaaccgctggcagaagtcgtccagataggacccctcccggctgaccattccgtcctcgcagtaggtctccactgtgggctccccccgatagtccgcctgacggtggttcagggtgaggtagtggcagtactcgtggagcacggtctccagaaaatagtcccggtcccccatgtccgccgggtccaggcagatctcccactggctccccccggggtcggcgggcagcacataggccaccgtctccccctcgccgtccgtaaagggcacatagctccgaaagtcccgaaaggcgtcctttgggaggacggcctgcatcgactcccacatctcctccaggtcctccctggtccagggcccgtgggtcaggtccagggagttgggcatgagggtgagctcccccgccccgccgatccggtagcgggccaggacgtgttcctccgggtccgtgtagccccagcccaggtcgtctccccccagataccggatggtgtatgcctcatagagcccgttcagttcctccagcagctcctgctcccggtccccccgccgatactcgccccggtccagccgggcctggcgcaccggtcggagccgcatccacaggtccatggccgcgctccgctcctcctgggtgatgacctccgccagcaggcccagctgcacgtccagctcccggtccaacgtctcctggtccgctcccggggccggggaacaccccgccccaaagagcaggagcaggcagagggcggccccgatgagccggtcctttcctcgtctcataatttctcccgtcctcccgactgatacagcagggcgttgcacagggcggcggccaccgtgctcccccccttccggcccagagccgcgatggcgggtatcccccgctcccgggccagggccaggatctcctccttgctctccaccacattgacgaatcccaccggcaccgccaggatcagggccggggacatcgctccggcacggatcagctgggccatgcggatcagcgcggtgggggcgttgcccacggcatagatcccctcgggccagagggccgccccctggtccaccgccgccgccgcccgggtggtcccggcctctgccgcccggcgggccacctccgggtccgccatgaagcaatggacgctgatgcccagccgctccagcgccccccggttgatgccggaccgggccatgttggtgtccgtcaggatgggggtgccggcccggagggcccggaccccggcctccaccgccccgggggtgaacaccagattacgggcgtagtcaaagtccgccgtggtgtggatggcccgcttcaccagcggcgcctgatccgcaggcaggacgatcccccgctccgccagctccgccccgatgatgcggaagctctccgcctcaatgtcagcggggcggctgtgttccagctctctcatgcctcctcctccctccggcggcctgagatgagccacaccggattctgccccatcatcaggttcagcccaccggcccccttggaccgggccgcccagatctgggtcacctgggcctccagcccccgggcggcaaaggccgccgcagcagcggacagggtctccagggcgatggcgctgacgcacaggcggacccggggattttttcccagggccgcggccaggatggcgtccagctccccgccgctgccccccacaaagacgccgtccggggcgggcaggtcctccagcgcggcgggcgcggtcccccggaccggcaccaggttccaggcgccgaagcgcgtccggttggcgcagatcagggagagggcctcccccttccgctccacggcgtacacccgcccccgccgggccaggagggccagctccaccgagaccgagcccgtgcccgcccccacgtcccagagcacgtcgtcctcctccacctccagcagggagagggccgcggcccggacctcccgcttggtcatggggacctcatcccgcaggaagtcctcgtccgggattccggaggagaccgccgccctggggcgctccgccccctccaccagcaggacgctgaggggggcgaaggtcccctgggcaaactccgccgccgtcccccgggtgatccgctccgccgggtaggacagctcctcacccaccactgcccggaggtggcccagcccggcatcccgcagggcctggcacagctcccccggccccagctcgccgccggtgaggaaaaacgcctcccgcccctccagcacggcggccaccgggtcgcaccgggtcccgtgggcggagaccagcttccagtcctgccagggccgccccagcctggcggccagatactggacgctggacaggccgggcagcacccggaaggggatgccttccttctccagcagggcggtcagggagcgggccccggagtagaacccggtatccccgctgtacagcacgcaggggcgctccaggccgctccggcgcaggatctccaggatctccgtccccttggtggcgggataccggggcacctcacgtcccagattcagcccctccaccagacggcgggccccgatcaggccgtccgccccctccagagccctgaccgcctgggcggtgagggtggtggggtcgcccagtcccatcccgatcagcgtcacttccattctgcttcctccttatcggcctggaaccaggccagaatgtcctccaggccctcgccccggtcccgggggcggcggatgaccagcagctccacccccgcagccagggcggcggcggccttctcccggaagccgcccgcctctcccccgtccttggtcaccaggaagcggatgtgatactgctccatcagcgcctcattcaggcgctgggtgaaagggccgtagagggcgatgatgttccgggaggggatgcccgcccggcggcaggcggccacgctctcctccgagggcagcaccctgggaaagaggcgggcgggctccagggcggcaaaggccgggagctccttggccccagtggccagcaggatgttcccctcccgccccgccagcagccgggcggcctcctccgggctgtccacccgcagcccctcctccccgccttcgggccggagcaggcggcgcagggggacgccggcccgggcacaggccgccccgatctcccgggtggcctggacagcataggggtgggtggcgtccacacagcggtggaagccccgggagagcagagcatccatctcccccccggatctgcgacccaccaggacggacacatcctccaggccggccagctcctccgcccccaggggggtggccacgctgacccagacctggtggcccatggccgacagggcccgggccagccggcgcccctcagtggtgccgccgaagatcagcaccctcacagctcatacccccggggggtcaccatccggtctccgatccggcgggtggcagcggagccgatgaatacggtggtgaacatatccacctgggcctcccgcagctcccccagggtgagcacctggtgctcctcctgggcacgtcccgcgttccggacccagccgcacaccgtctccggcccccggtggaccagcacgatgtcacaggccatgcgcaaatggtcccgccgccgccggctggaggggttgtagaggcagaggacaaagtccccctgagccgccagctccaggcggcggcggatgacctcccagggggtgagcaggtcggacagagagagcaccgcgaagtcgtgcatcaaaggggcccccagcaccgccgcccccgccagggcagccgtcacaccgggcaccacctggatctccacctccgggaactggggggccagctccagcaccggccccgccatgccgtacacccccgcgtctccgctgcacaccagggcggtggtccggccggaccgggcccgctccagcgccgcccgacagcgctcaatttcttgggtcatgggggtggagaagtactccttatccgggaactccccccggatcagatccagatagactgtgtagccgcacagcacctcggcctgctccagggcagccctggcctcccaggtcatccacctggagccgcccggacccaggcccaccacatacagcacattcatggcgcttcctcccatcccggggcaaagggggcggcagccagcgccgccgtcaccccctcccccgctgtctttttcagcagcagcgggccgccgctggccagcaccgccgcccgctcgcatacgttgtccgtcccggtgacctgacggacgaagggggagggggtaaactccccctccgcccggctcagctcctccggggaataggtgcgcaggggcagccggcgccggcggcacagctccagcaggccgggctcctcccccttgcggtcgatggtgcacacccccgccagcgcggctggatggagccccgccgcctccagcccggagcggagggccgcctccagccgttccgccgggacgccccgccggcaccctatcccggcccagacgatcctgggcaccagcttcagggcgggctccggcgtgtcccggatggtgagctggacctgggccgcctcctgccccgccgggaccactcccgaggggcactcccctgccaccggccactgggaccagaaggccgctgtcccccccgccagcatccgggaggccacggggcggatcttctccgggtcggggatggcgcagcccaggcggcgggcccactggtcaaaggcaaagatcccccgcgcatcggtagcggtagtgaggaccgcctgcccgcccagcagcccggcgatctcccgggccaggtcgttggcgccccccagatggccggagaggatggggacagcgaaccgccccagctcgtccaccaccaccacggcggggtcccgggccttactcaccagatggggggccaccgaccggaccgcgatcccggctgcccccacaaagatcagggcctccgcgcggcggaaggcggcggcggtccactcctccgcccgctcgcccttccgggtacaggcggcgcggtgcccgctccgctccaggccggccgccagcgcggcggccagcctcccaccattctctgtaaaggaaataagctccacagtcattgggacgcctcccgatagccggtggaaaacccggggtggtagagctggctgcggtcatagggtccggccaggatgtcccccaccaccaccagcgcggtcctggagatctggtggtcccgcccggcctgggccagttctcccactgtgcagcgcactaccttctcctccggccaagtcgccttatacaccagggcagctggagcatctgaccggtatcccccctccatcagccgggcagacagtgcctccagcatcccggcggagaggaagatgaccatggtggccccgtgccgggccagggaggcgatctcctccccctgcggcacgggggtccggcccgccatgcgggtgatgataacggtctggctcaccccgggcagggtgtactccgcccccagggccgccgctgccccgcagaaggaggacacccccggggtcacgtcccaggggatgccccgccggtccagggcgtccatctgctcccgcaccgcaccgtacagacaggggtcgccggtgtggaggcgtaccgtctcctgccccgccgcctctgcgcgctccaccgcctccagcacctgctccagcgtcatgcgggcactgtcatagatccgcgcgctgtccctgcacagccccagaagggccgggttgaccaggctgcccgcatagatgacgcagtccgccccccgaagcagctccgctccccgcagggtgatcaggtcgggcgcacccggcccggcccctacaaaatggaccatggaaaaagcctccttcccacacggatcagagataccgcctgacccgcttccgatacgcctcgtagggtgcgccgaactgctccctgcaccaccgctcctccgccaggatgatccagtgctccgagagctggaacagcaggaccagggcggccaggagccgggagcgggtcagcaggacgcaccccgcaaaatacacgaaataggacacatacatggggttgcgggagaaccggtagaggccgtcctcccggaaagggcccggggagggccttccgaaactcaccaccgcccccgcgcacagggccagccccaaaaggtacaggacaagtcccgcccaaaagggccaggcgccctccacctccgcccgctgtgcgcagagacacaccagcaccccggcggaggagagctgatagacccaataggccagccgttccctgccccccatggggggtatgtgggcggcgcggcccagtccgtcccttcccagccggcccaggagcccaaatcggagcagcaggaaggggaacagcaggagcagaccggacacgcccatgtcacggcaccagaagggtggtgaagtagctgccggactggggagcgtccttcaggctctctgccgcctgctcccccggcaggccgcagttctgcaccatggccgagctctccagcaggccccggctctccagcgcctccagcacctggggcagggcccggccggacttcatcagcacctttgtccccggcaggtccagggcctcctccagggggaagccccccgccgggacgatgtggaccggcaggtccatctccgtcaggctccggcccagccgggccgcggcggcgcagaagctggggacccccgggacccggacacagcggcagccctcctcctccagcagctgggccacataggcgctgctggcgaagagagacacgtcccccagcaccggcatggccacgtctgtcccgcggtccagcagggcgcgcaccgcctccgccgctcgccggtgggcctggcggcgtttctcctcatcccgggacatggcaaagtctataaagtgtatctccttgtcagtcagatccgcacccgcctgggcgatctccaaggccagggagtcccccgccggcgtgcgggggacagccaggacgggacagtcctccagcacccgcaccgccttccgggtcatcagttctgggtccccgggtcccacccctacggcgtaaaatgttcctctttcgctctccatatgttcaagatctcctttgcagtcccggtcatccccagcaggccccgggtattggtgaacagtacgccgccgcagcggcaggacgtccccgcccgccgctccaggtgtgcctggagggcggacagcaggctgtccatggtccggtccagcaggccggcctccgccaggatgtccagtccggcgtcggtggtggcgctgcccatcagggcccgggcagtctcctggccggccccgcacagggccgcgtgggcgcacaggatctccatgcggcagtccgcccagcgggagtgggtgttcatcacgccccccgccaccttcaccagcttgcccagatgccccaccaggatcagctgcctgatccccgcctccgcggcgcggtccagggcctcaccgataaagttagaacactttactatcctgatatcagaagggatcaggccgctctccgccaaaaaatcggccccatagttgcctggggtcagcaccacccggtccgccccccccgccgccgcctggcgcagctccagggcgatggtctccaccaaggcctgggcgctcatgggctccacgatgccggaggtgcccaggatggagatgcccccctccacccccagctgaggattgaaggtccggcgggcggcctcctcccccccagggacggagatggtgatctccagtcccccggcgtagcccagggccgccgcctcttcctccgccgcccgggcgatcatcctccggggcaccgagttgatggccgcctcccccaccggctggtccagccccggccgggtgacccggcccaccccgggtccccccaggatggccgtccccccctccgccctgcggcggaccgtggcccggatgggcagcccgtgggtggcgtccacgtcatctcccccgtccttctctacggagcaggcggcggtctctccgtctgtgacgcagtccagcaggggggcctccaccatccagtctctgggggtgttcagggagattaggtccggggcccgccctgtgaggagcagccgcaccgcccccgccgccgccatggcggcgcaggtcccggtggtgcgtccgcagcgcaggcgcttcccgcccgcagtgatgtagtgctccggcatcggcagctcctttcccgcggcatgtctcttctctcaggacccggcccgcagctcctccaggcggcggacatagagggcctgtacctggggcagggcccccagtccggtgagccggcaggacacggcatgcccccggctctggaggagccttttccagctgtccggcccctcccccgccatgtcgtggagggcgtgatccccggccaccagcatcagcggcaccagctccacggcgggggcggtgaccagcggcagcacctcctccaccctgggccggccctccaccgtggccaccaccaggtcgtcccgcccggccagatggaagatgccctggagggccgggtagaccaggtcggcggatctgtgggtcccgtggcccatgaacagggtctgggccccctctgccggggggatcaggtccatcagcgccccgcccagctcccgcaggtcctccggcgtccccagcagggggcgggagagcctcagcgcgggaaagcggccctcccaccgggcggcggtctcccttattttatcatattccgcgcccgggagcaaatgggtgggcacgatcagggggcactctatcccctccgccgccatctgctccagggcaccggccacatccgggaccgcgatcccccggtcccccagccgcgcccggaccagaccgctggtgtaggcccggaagaggggcagctccggggcggcggcggacagcgcctgctccaccccctccaggtcccggctccgggcctggtccaccgtgctgccgaagctgacggccagaatggcttctctcatatcgattcctccccttcgtttcggatgggctgaaaaaagatgcgcaggcagccccggctgtcccgcgccacctccgcctccacctcatagatctcccggaggagctccggggtcagcacctcctccggtgtgcccgaggcggccacgcggccagccttcatcacatagagccgctggcagtacagggccgccagattcaggtcgtggatggccgccaccaccgtccggcccaggacccgcaccagctccatcagctggagctgatatttgatgtccagatggttggtgggctcgtccagaatcaggcagggggtgtcctggaccagggcccgggcgatgagcacccgctgcttctccccgccggacagggtggtgtagctctgctcccgcacctcctccagctgggtgaggcggagcacccggtccaccagcgaccggtcctgcccattgtcggcctccagcagtcccttccgggcgtgccgccccatgcggaccacctcctccaccgtaaagtcgaagccgctctcgtgctcctggaccaccacggccagccgctgggccatctcccggccgctcatggccagcaggtcctcccccatgaggaatgcccgccccgctctggggcggagcactttgtagaggttcttcagcagagtggactttccgctcccattgggcccgatgatgccaacgaactcccccgcctccgcccgcaggctgatctcgtacaagatctccctgtcccgggtcccataggagatcccctccgcagagagcatggcgctcccctccttttcttcaaaattcatagcgccgcacccggatcatccataaaaacaagggggccccgatgaaggcggtgatgatgcccaccgggatctcctccggccggacggccagccgggcccccacgtccatccagatcataaagacggccccgcacagggcggacagggggatcaggcggcggtggtccgcccccaccacagaccggaccagatgggggatgaccagccccacgaagccgatgcagccgctcaccgccacagcggaggcggtgagcagggcggaggacaggatgagcactccccgcacccggtccagatccacccccagggtgacggcggagctgtcccccatgagcatggcgttcaggggacgggccagggccatcagcaccaggaacaggggcggaaggatcagtgccagcaggggcaggtcctcccatttggcgctgcccagcccgcccagcatccagaaggtggcctcccgcaccgcggcgtcatccggggcagtatagacgagataattggtaaaggcctgaaacatggcggagaccgccacccccaccaggatcagccggacgggggtgacggcgccgccggagcgggacaggccgtacaccagcaggatggacaccagcgcccccacaaaggcgccggcggggacggagagccgccccatgggcagccacacccccaccagcatggccagcacggcccccagggaggccccggaggagatgcccagcacgtagggttccgccaggggattgcgggtgaaagcctgcatccccaccccggacagggtgagggcagcccccaccagcatccccagcagcacccggggggcgcggaggtgccagacgatattctgtatgctgtcccggataccctccaggctgatccagtcccccaggcccaggggggtaagcagacggtggagcatcacccgccacacctccgggaagggaatggtcaccggccccaggctgatgcccagcaccacggagagcatcaggaccgccagcagggccagacaggccagcccggtatgcgcccggaccgcacggcacagccttttcatcccgccgcgctcactggaagcagtccgggtggaaggaccgggcaaatttttcgatggtgtcccccgtcatggaggaggcgaaggactcgcacagggtcaccgaggtgatgcggccgtcccgaatggcaggcacgtccgccagagcaggattttccttcagctcctcgatcttctcctccagggaggtgctgccgtagtcgttgatgacgatgacctccggggcccgttccaccacctcttcccagctgacggtggcccaggtggtgtccatgtcctcaaaaatattgacgcccccggcgtgggagatcagcttggcggtgaagttatccccgcaggtgtaggcgcccccctcctgggccatgtcgtagacaaagaccttcaccggctcggccccggcgaccgcctcctccacggcggcgatctgctccttcatggcgctgacgatctcctccgcccggtcctccacctggaagatgcggcccagatcatagaagtcctggtagaccacgtccacgtcggcccccacggtatagccttcgatggaggacagggacatgatgccgtagccgctgagggtgtcgtgggtggtgttgttcttctcgctgaaagagctggagcggccgtagacgaagtcgggctccagggagaggatggtctccagggagatgtagctctccgccacggtgggaatggcctcatactcctcccgccactggggattgacctgggtgttgttgtaggcggtggcaatgatcttgtcccctaggcccagggccatcagctcatcgccggcgttggggttgcaggagatgatagtctcggggacgtgggtgaaggtcacctcctggccgtccttggtggtcagggtgaaggggaagccgctctcctcctgggtgtggctgctggaggcggactgggccggctggctggaggcggactgggcgctctggctgtccgtttcgccggagcacgcagtcaggcccacggtcagggtcatggccagcagggctgcaagggacttctttggggttttcatctgtttttccttccttttttccgcggcacgaaaaacacctctctccagacattctgaaaagaggtgtgagacaacaaagcacggtcccagcctttccggccgcgccaaattctccccagatgattggtccgaccacccgggagtgtctgccctctctcggcagtatcctccagcaggcaggtcttccggctcgggttcccagcctccggtccgccttcccatggggcccctccccacagtggctgatgaaccggcgctcacccatacggcggcggtcccgcgcgggcctctcacccgcttccctattctcccggccggccctctccgggccccgggcaccttctggcgctttgtcggtcctattgtaccggatacggcggcccctgtcaatgcgcaggcagcgcttttgtgaggctgatcgtcagaacaggtccgcactgttatggtgagtcaccatccccagcagcggcattcccgcaccacacgggggagatccccgccttttgagcagaaaaagagagacgggagtcccgtctctcttttttcctcgcagacgatcaggcgttggccgcgggggcctcctcctgggcgggagacatgacctgctgcgcgtaggctgcggggacgtggatcacgcccaccgggcactccttggcgcacaggccgcagcccacgcacttctcctggtcgatataggccaggttgttttccacggtgatggcctgcttggggcaggccttggcgcacttcatgcagccgatgcagccggcggaacaggccttccgggtctgagcgcccttgtccttgttctggcacagcaccacaggcttgcgcttgtgctccgggatgatgctgatgatggcgttggggcaggccttggcacaggcaccgcagccggtgcatttctcccggtccaccagggccacgccgtccaccacatggatggcgtcgaaggcacagacgctgacgcagtcgccgtagcccaggcagccgaacttacagtcgccgtcgccgccgtacaggcccttgaccgcctggcagctgtgcaggccctcaaactcaaagcgcttgccggtcttcccgcaggtaccggagcaggccaccacggccttcatggggacggaggcgccagcctccacgcccatgatggcggcgatctcgccggccaccttggcaccgccggggacgcacttgttgacggcgttgccgtcctccacgatggtcttggcgtagtcggcgcagccggcgcagccacaggcgccgcagttggcgccgggcaggcacccggtgatctgttccacacgctcatccaccgggacatacataaagatagaggcagccaccagaatgacagcgccgatcaggccgatgacggtgacgatcaggactgccagtaaaatcggattcatactctttcctcccctcctaagctcaggccccgaaaatggattccacgatgccgccgaagcccatgaaggacagggaggtcacagccgcagccaccagggtgatgggcaggccctcgaagcacttgggggtgacggcctcctccacccggcggcgcacgccggagaacaggaccatggccaccaggaagccgatgccggcgccggcggcgcagacgatgctctccgcgaaatcatagccgttgtcgatgttcaggatggtcacgcccaggatggtgcagttggtggtgatcaggggcagatacacacccagcgccttgtacagcgcggggatgaacttcttcagcacgttctccagcagctgcaccaggatggcgatgatcaggatgaacacgatggtctggagatagcccaggtcgcggctcgtcccctcggcccactcaggtgagaggatgtaggtatagatgggccaggtggcggcggtggccatgaccatgacgaaggtgacggccagggacatgccaacggcgctgtccagctttttggacacgcccaggaaggggcagatgcccaggaacttggccagaacgtagttgtccaccaggatcatggtgaagaaaatgctggccagcttcagtgcgagctccattacgcattccctccttccacggtctcagcgggcttcttctccttcttgggccgggtggtcagccaagtggccgccgccatcatgacgccgaagacaaagaagccgccgggggcgctggtcatcagggtgaaggggtccacggaggtggggatgacctggatcttgaagccctcaggcaggaagggcagcaggccgtccaggccggccatccaggtgccggagcccaggatctcgcggatggtgcccatgatggtcagggtgatggtgaagccgatgcccatgccgatgccgtccagagcggaatccaggatgccgttcttggaggcgaacatctcagcgcggcccaggatgatgcagttgaccacgatcaggggcaggtacacgcccagggcgctgtccaggctggggacataggccttcaccagcatctggaccaccgacacgaagccggcaatgacggtgatgtagcaggggatgcggacctggtcggggatgaccttccgcagggcggagatgaccacgttggagcacagcagcacgaaggtggccgccagacccatgccgatgccgttggaggccatggtggagacagccagggtggggcaggtgcccagcaccagacgcagaacgggattctctttcagaaggccgttggtcagtacactcaatcttttactcattttctatcgcacctgcctttctcaggagatcgcgttgtacgcggcgatggcgaagttgacggcgtcattcacagcactgctggagatgctggcgccggtgatccggtccacctgctggtccagggtgatggtctcggcgggcaggccggtgtactggctccagaaggactcgttctcgatcttggtgcccacgccggcggtctcgccctggctctggatcttcacctgcttgatggtgccgtcggggtcgaaggccaccatgaccaccacagtggagctgtatcccttgtcgctgctggtgatgatggtgcccacaccgttgtcggcggtgtagatctcggtgacgccctcgaactcgccctccaccagggtgaagcccgtggcttcaggcagcagctcggtgcgggccgcctgggcagccgcctcctccgccgccttgatgacgggggcggtggcgctgttggtggcggccaaggcgccggtgatgacgacgcagatcagacacaggaccacgatgggcttgccgatcttgttccaattgctcatttcgcggcacctcccttgttcttcttaggcttggagatccccagcagatcctggcgggtcagcacttcaatgtaggggaccagcaggttcatcagcaggatggcgaaggacacgccctcgttcatggtgccgaagaagcggatcaggcaggtgatgacgcccaggccgatgccgaagaccagcttgcccttctccgtagtgggagaggtgacatagtcggtggccatgaagaaggcgcccaggatcaggccgccggagagcagctgatagatggggtcatagccgcacagcaggctgaataccgccacggtggccagataggtcaccgggatggtggggctgatgaccttggtccagatcaggtagataccgccgatcagcagggtgatggcgcaggtctcacccagcacgccgccgtggttgcccagcagcagggtgacataggagcccgcgttctgggcggtctcctccaccgccagaggggtggcggaggccagggcgtcgatgccgttctcgggatatgtatagctggtcatggcgccggtgaagcccagggccatggcgatgcggcccacgatggccgggttggcaaagttatagcccaggccgccgaagagctgcttgatgatcacgatggcgatgaacgcgcccaccagggacatccacaccggcagaccggcgggcaggttgaaggccagcagcaggccggtgaccacggcggaaaggtcgctgatggtcacgtcccggcccaccagcttgcagtaggcgtactcgaagaccacacaggccgccacggtgacggcggtgagcagcagggcctggaagccgaagatcagcacagaggcgatcagggtgggcagcagggcgatgcacacgcggcccatgatcttgctggtgctgtccgcgctggtgatatggggcgcggcgctgacaataagtttattggccatcacttcttacctccattcttcatcatgatcttcgccagggcaatggagggggtcagaggccgcttggcggggcagacaaaggagcaggtgccgcaggacatgcacaggtcggcatgcagctggttgagcagctccacattgcccttgttgaaggccaccacgatgtccttggccgccagccccagggggcaggcgttgacgcagcggccgcactggatgcagttgctggccttgggcagcttggcccgctcctgggagaaggccaggatggcgttgttgttcttcaggatgggctgggacaggtccgccacgcaggtgcccatcatggggccgccgtagaggatcttccccggctcggcggtgaggcctccgcagaagtccagcagctcctggatgggggtgccgatgatgacctccacgttcttgggctgcttgacgatgtcgccgtccacggtgaggcgcttggtggtcaggggcatgccggtctccagatacttggagacgaaggccaccgaggtgacgttcatcacgatgacgcccacgtcggagggcagcccggggaagggcacctcccggccggtgcaggtctcgatgagcaccttctcagcaccctgggggtaccggcagggcagggtcttgacctcgatggccgggtcgtcgatggcggacttcatcttggcaatggcctcgggcttgttgccctcgatgccgatgacgcacttggcgatgttcagatacttcatcacctgcttgatgccgttgaggacgtgatgggtgtcctcgatgaagcaccggttgtcggaggtgatatagggctcacactccgcgccgttgatgaccagcatgtcgatctcgtccaggttcttgggggacagcttcaccgccgtggggaagccggcgccgcccaggcccaccagaccgctggcccggaccgcgtctacgaaggacttcatatccgtcacctgcgggggggcgatggaggggtccaccgtctgctggccgtcaggggtgatgaccacggcctgctgggccgcgccgttgggcgcggtaatggtggtgatctcggtcaccgtaccggaaacgccggagtggatgtcggcggagacgaagccccctgccttgcccaccacggtgcccacatacacctggtcgcccttggcgacggcaggggcggcgggggcgccgatgtgctgtcccatggacaggacgatcttggacggcagaggcatcgccaccgtctcaaggttggaagtccccttctcgtggggcactcccgcgccctgcgcggaacgtctgagaaaattgctcattcagatttcaacctccctgtactgcattcttgggatcacatttgttctctttttcgtctggcgggtggggactccctttttaccgggcttgtccagccgccttctctccctccccaaaagcataaaataaaatggaacttgccgcggaactgtgcccacgcacaacaaaacccgaccggtcttttccgctttgaaaaaggccccgtcggtgtccgcacggctccggccccctccctttggacgggccgctccgcgctgcattacgtgcattatcatacacccatcttccaaaaaacgcaaggacagtttttgcctggatggggatctttttttcaaaaaggggtgtttttccatagaaaacagccccttccgttccggtccgccggacagaaagggcccggggtgcgcaggcaccccgggccctgttcctcgtgttcagcagccgcagccgttgttgcagccgttgttgttgcagccgcagccgcagttgtttccgccccagccgccgcagcagcacaggatgatgatcaacagaatgatccacaggcagcctccgccgccccagccgttattgcagcaccccataatgagtacctcctaatttatgaattgcgaggccggctcaacgccgctctcaatcctatcttatgcggaggcacgacaaaggtgtgtcacaggtacttctcagcaaagttttgcagcatgaccgccacctgggcccgggtggcgctctcgtccgggctgaggagcatcaggtccgcgtccgagctggacagcaggccggcgcccaccgcccaggccaccgcctcgccgccccagctggccaccgccgccgcgtcctcatagggggtcaggtcggcccgctctgtcagctccagacccaggtagttggtcccgaagctgtaaagcagggccaccgcctcccggcgggtcactgcctgctccggggagaaggtatcctcccccgtccccgccgtcaccccctggtccgccgcccagctcacatagggggcgtaccactggcctgccggcacatcggagaaaacggcggtggaggcgtccatctccccctggggcgcaccggccatgttgtaaaacacggtcacgatcatggcccggtccatggaggccatgggagaaaagagtccgtccccggttccggaaaacagctgctcaaagtagacataatccactgcggagctgtaccagtcagagcgggagacatctgtaaagggagcagccttttctccgctctccgtcttttcaaagctcccctgcacccccaccttggccaggccggagtccgcggtgaagacggcggaggtgtcctcccccaccagatagcggtgtccgctcaccagggcggctccggatgccaccgtctggcccgcagtcacgtcgatcaccgccccggtgtggacaacggtgccggcgcccgccgccagctgtaccaccgaaccggtgggcagcttcagctgatccccccggaccatgtcccggctgcgcaggtcggcgctgtaacttccgccgctcccctgctgcaccccgtacccctggttcacctcgtccagcttctggctggccgcctgataggcctggatcagcttttcgtccgccgccttggtcccctgggccaccacggtggggatataggtgtcattgagatagctcagggagatcaggctgtcccctgtgctcagggccagcgccgccccggtcaaggccgcgcaggccagcaccgccgccgccgcgcgcaccatatgctttcgtttcatgtctcctcctcacgctcctcccgctgggtgatgagatagctcagcgtcagcaggctgtcagaaaaatgtacgttttccaccgccacatccggccgggagacgctgatctcccggttggtgaagttccagatcccccggactcccccggccaccagccggtcggccaccccctgggccgccctctggggcagggtgagcaggcccacgctgaccttgtgggccgacagatactcctccagctggtccacatggtacacgttcactccgccgatggtggtgcccaccacgctctcgcccacgtcgaaggcggccaggagctggaagccgttgctggcgaacttgaagttttccatcagggcccggcccaggttgcctgcccccagtaccactacggtgtgaccctggctgatccccaggatctccccgatctcctcccgcagcaggtccaccttatatccatagccctgctggccgaactcaccgaagcagaacaggtcctgacggatctgggatgcggtcagccccatggacttccccagggcgctggaggagatccggatcacgcccttcccctgaagctccagcagatgccggtaatatcgcggcagccggcgtatcaccgccgtggaaacctttgtatttctcttcatcgtgtgatgctccatcctccgtcggcgcccggggcgcctgtctttcttttcagtctaccccatcccggggctgttgtcaatttctaaaatcaggggcacaggtcccccgccgcccgttccctgccccggtcaacggtccgttgattgcttttttctccgtcttctggcataatgccggttagaaggagggagcacgatggatcaaaaaaagaccggtgcgctgatccgggtcctgcggctggaaaaagggctgacccagcaggggctggccgagctgctgggagtcagcaaccgggccgtctccaagtgggagcgcggactggggtccccggacctctccctactgcccgccctgtccctccagctgggcgtggatctggccggactgctctccggcggtctcccggaacccgacaacacaggaggaagcatgaaacacattcgattttttgtctgcccccagtgcggcgatctcatcaccgccaccggggaggccgccgtctcctgctgcgggaggcggctggagcccctgcccgtccagaagccggacgaggcccacagcctccagatccatccggtggaggacgagtggttcatcacctccggccaccccatggagaaagggcactgcctgtcctttttggccctggtcaccggcgagcgggccaccgtgatgaagtgctggcccgagtgggacctccagcagcgcatcccccgccggggacacgggatgctctattggcactgcacgcagcacggcctgttccgacaggtcctgtgagcggccgaaggtctgaaggagaacgagcgcg

SEQ ID NO: 710 - DNA, 7547 bp, Lawsonibacter asaccharolyticus
  source 1..7547: mol_type = genomic DNA
ctaatgatatgaattgtgtggacatatccaaaaagaaaggtgaactgtaaaatgtaacagggtgaatgaaaatggcaaaaagacccgtaccattgtacgactttaaggctttcggggcagctataaaagccgcgagaaatgaatacggcgagagccgcaaaaaggtaagcgacgagttatatatttccccgcgctaccttgcgaatatcgagaacaagggacaacagccgagtttacacctcaaatagttacctatttttcatctgttttatgtgcttaatccatcctctaataagccatacataaacacagacagcaataataacagagaaaagcagaactgaaattcctttactcatttctccttgaaggagcagatctccccctataaaaaggctcattcccaccaacaggagatagcccacaatgaggattgccaaaaacgcctgacacaaagtcctcaatacccttttcgtttttatagagcctaccgcttgaaaggctcccatcattacaaactctacaacaagaaaaaatacgaaaaagcccaaaatgataaatatcttatctcccatttggaacctcctttagcctcgaaagagcctactaaaccaactccgcttttgttccggctcccgaccctgctgctccgctccggtctccccagtaaggagctgctgctgaattgtccccgcgtgaagggcctgggccgctgccgctgtttgctgcgctgcggccaacgcatcagtgagccgggtaatggtctgggcctgctgctcgatctgccgatctttcatttcaagctgcccttgcagcgtgtcgatggtggcctgcaaaacagaaatcacaccatcaaccgccaccgttttttcgtcatttttggttgacggcgcgtcaaccaaaccgtcaaccgcacccgtcaaccggttgtcggtggttgacggtgcattttcagaaaatgcctgttttatcagcttttcaccgtcaacctctaccatcaacctaccgtcaaccgttgccgtcaacccctgtaaactggttgacagcggttcacgcttgatttttttgaaaaccgcctgctttgatacccctatctcgtcggctatctgccggatcgttttcatacctttacaaacaggccgacaggacacacacccttaaaaccaggcgtagatatgtaccagcagccagggccttccggctcccaggctatttcaagagtaatctcatgccaaccatctggaaacagagccgtaaaaccctgcccggcgtgtatgccttctccctccaggagcagacgggggtgcggatcatcgtccgccggatcagggagctgcagctgcgcgatcctctctttatcccagctcataaaccggcccttcctttctcaatcgtcatagtggcccaggcaggagataatataaatcaccccgccctgctcatagtaaacaatgcgattggtttcgtcaatgcggcggctccaccagccgctcagattagcccgcagaggctccggcttaccgatcccctcataggggcttctctgaatatccttgatcagtgcgtttatccgtttcagcgtctttttgtcctgcgtctgccaatacagatactcgctccacgcccgatcctcccacagcaacctcatcagtccacctcgatcaagtcatgctcagcaaaatgggccttgccagttttcacatcctgcatgacgctctccaggtgccgaaggttgctttctgaatagaacggatcagccgaaacctcaaacggtatgcggtactctctgccgaccttctttgcgaacatcgtaaaggccgcgctcatggaaaggcccatctcggcacaggcccgttccattctcttcttgacatcttcatccatcttgatatttacattgaccgtgtgtgccatatcgaacactcctttcctactcatagtatatgcagaaagaaagaaaaaatcaagtatttttctttacctttctgtaaatgccgttacccctgatgtgtggacatttagagggtaaaaaagccttgatttatgcggctttccgggcgcagtagagagggggtggtatctttaccatcagagagccggaaaagccttcctggaccgctccagggccgaaaacagcccctaatccttacccggccccaaagcctccaccagcagatcactcaccgcctgggagggcgtcacgcgcaccgtgatatgcccatcctggacacgcacagtcgaaggcgcggtgtcccaccacttacggatcgttttgggatcaaggcccgtatcccggtggcagtcggccttgcgaccttctgggtgctgctgccgccactcatacactcgattctgggccgatggacggccattcccttcccgccaattatcgtgaattatgtccctcgttgccctggcaatcttcaaatgctgctcctgcttgcgccagttccgcttattgacgggcatagtcagaccagagatcttcgctatatcgtccctgggaaatgtcacataatcctcgttatacatctccagagcgcacaccacatcatctttcgtaaaacggttgatgtcctccacgctcatatcatcatagggtttcagcagggagaaagcgtcccggcgcagctcgtcctcgctgatcccacacttcttcgcatagatcgccagcgtcataatgccataaaaccgatggcccaccctgatctcgtccccgatccggtgcagccaccagtcataaaggtcacgcttgaccgtccagcgaccccgccgctccttcttgacaatccgccgctcataccagtccgggtacttctccttcgcctcggccagtgagagccgacccttccgcatgaggcccacaaggtattgttgctccccgttgctgtctgggataaagtccagcaacctttccagcgtcaccctcccaccgagccggtacgccgtcacagggtactcccggcccaatttggagccggagccaaccacccggaacccctgtaaaatgccctgcatttgcggctcctttatggtagaggtgtacctgttccatatctgccgggtaagggcatacttcaattccttcaagcatttctggttatgagggtacatagggatcggctcttccaggacataatacaggtgaagtccggtcccgctgtttacaacaaaagtcgcctggggaagaatatccttgttcatctggtgcagcgtgtcccggagctggggcatacccaccccatccagatcaaagaccaaggcatagagataccgagcgttcttgccacaccgccgcctcccaaagtaagacagaggggacatgatagtaaagtccgtatcaaagacctcggccagctccgacaattcgtccgtgatggtatagcgtttggccttgccgtcaccctcgatctccagagcaatccctgcggccttcggcaccgtcaccgcgatcccattgcccttcgcgtcctcaaaatggcctttccgctcaaaactgcctaccggaaagatctcccggtaaaattcaaagggagtgaccggctccaggaacttcgccaaatgctcgttcttttccaggtacaattcccgcagccgctccatagcggcctgctgatccatagccatacgcacacctccaaaagaaaaagtaacaaaaagaaaatccgctgcggcggggatcgcctgcgggcgggaaggggggaaagggggagccaaagagcggcccctacggggccttaaagagaaagtcacctccccctttcccccctcgctctggggcatggaaatgatggaaaaccctacgggtttaccacattcccacaccccgccgctcaccccccttttcccctccgactttctccctgtccgagagagaattttaagagattttattgagggcctaaaggcccttaggggggcatatattatcaatatattttttccctatttttcgacagccataattccggcccttttttctatccctcacaggcccgtacacgcggcatatattatcaatatattttttccctattttcagttgttattatagcctgtccgaacggctctttcaagtcccccggacaggctttctttacagctccatgccgccccaggtgtggctccgttcctgctcctgttccggctgctgcagctccggcacaggcagcaactcccgcgccctttcgatcaagggccggaactgctccggtaggtgccgatccaggaagtccagcaccgccccgaccccctccaagagccgggacgagaagttgcgctcactgtccaagctgtcctccaggtacgccacctgctgccgcaggtcacggttttcgctgataagctcctgccgctcctgggcctccttcagcttttctttcatggacggcaaccggctctggagctgcttgttctcggctttcagctcccgcacttcctgctccgctgccgccccacggatcgccgctgccttcagctcttttatctgctccactgtaacgcccttgacggcccctgtcagcgttttctccggccggatcgcgtccaggtcaacctgcaccttctccgccgcctggagccgccgtacagtctttccgagggcctttttctgccgttccagcacagccatgtcctgctccgctgccgtcacctgttcctggacggcctccaacctctgagccgcagctcggtactccggcaagtccatgtggggacggcccccgcccaagctgacgatctcgaactcgtgtgcctgggcgatctccgcaagggacgctttctccctctccatccaggctttccattccgtctgcttgcggcccaggctttcaaagccctgctgctttaatgcctgtttcatggagaccctggtagacaggccccgggtctgctccgtggccaccggaacgaagtctacatggaggtggggcgtggcctcgtccatgtgcagcaccatattgaacacccgcaggtgggggttgcgctcctggaaggactccgcaaattctttgagcgctgccgctgcccgttcccctccaggggacccgcacccacagtcgttcaggttgccgatctggaagattgcctcgtgaaatagcttttcctgcttgctctgccggatatgctcatagtagtccggtatcttgtccctggtctttttctttttggcattgtaggcggccagggcctcgtcaaagacttcatgatagacctgtttcagatcttcgttgcaaaaggtcacattctgccccgtccggctccggtctacattcgcagctgtaaagctccggttgttgtgccggatactgccccggccagtcatgccggatatggttgtcccgataaaatcacccatcctttctatcgtccgtatcccttactgctcccatcttaccatagtccccgcgagggggcaacacctctttgttactttctcggtgagaaagtaactcaaaagcactttcacaccgccgccccgttggggcgtcagtatgaaagtgcttttgcgcgctcccgcgggggttcgccggagctgggcgggagcagcgggaaaccgcagcggccggcagctccggcgggcagctcccaaggcaacgatattaagggcttgtcctctctgcccctttcgctccgtacccgttcgggagatggctcttgagtgcgcttttcagaaaaaagttgaaaaaagcaaaatgcgcccgtccgcaagacgcggacgggcgcaaaggaaatgtaagcagtagctaaatgtattgacagttcacattcatagccggaatatcccgcttgcggagcatagctttttttgaccgcaaagcattaggcgggttacagtaaataaaaatggacacggcgatacctccccgataccgccgtatccttaaaaaagggcgactttaatacactacccgcaatccattctataatagggaacagcggcttttgcgcaatattaaataaaaaagccgataacacataggttttttgacctaatgcgttatcggctctgcgtctatgcgtctggcacttttaatcatttttttttgaatttattatatgtgttagctaactgtccacaagccgcgttaatctctctgccatgagaaactctcatagtaacttcaagtcctgcttgctctaattgatgtttgaatgcaactatttcccgtttctgtggtgctttaattcttgaattgcttgttgggttgtattgtaacacgttaatcataacttttttgccccgaaaccattttgcaagttgtcttacatctgagggccggtcatttatacccggtaaaagcaaatacgcaaagacaattttgcgattatgcctttcagaataggataaggcttgcttaacaacatcttcaatagcatatatgcgcatgtgaggaataatacgatttcttgcagattgtgttgctgcgtgtaaagatattgtcaactgaattttaagatgttcctcgcgcaatttttttaattgatcgaccggaccaactgttgatatggtaatgccgtcggttggaaagttgagcccatatctatctcggagaatatggattgcttttatcaagttgtcataattgaataaaggctctcccatacccataaaaacgatacggtttacttttcgacgcaacaatataatctgttgtacgatttctgacgatgttagattacgaacaaagccatttcgcccggactcacaaaaaatacaaccaacaggacaaccgacttgtgtgctcacgcaaacagttccaccatctcgccgcttgataaaaaccgtttcaatgtatttgttgtctttcagttcgtaaacatacttttcagtatcactgcttttgcaaatattttttaccaacattgatagattttttttgcgtggtaattgcttatataattcttcatataaggcttttgcttcattctcgccaataacttccgacatttctttgtaagtaaatccgtatggatcattccgtacttccgcaggcgtatatttaggtaaacgtttcatttttatatcctttcttctaaataataaaagtttgtttttctgtatttttgattacaatctctaatttttctacatcaatgatatgcgtcaatttgcatttagggcagaaaagaggaaaatcttttaatacagtattatgaaatacttgaactctcgtctttccgttacaaatcggacattttatccaatattttttaagcattatatttcactcgtcctttttacacaaaaaaatgcaggtcaatcctcaacatgagcattgacctgcatttataatgcacagagcagtacaacaaaactaaggcatagcttgcactatgtctatactatatctatacgtcgttagttttttgtatagcatccgcaaaataagcatgacaaaaaagcccatgttgaaaatgggaaaatcctttttttcaatgcttatctaatacgcatgctatgcaacataaacgccgcctccttttacataaattttattttatcagaaaatcagtctactgtcaatacacaacaggaagtatttaac

SEQ ID NO: 711 - DNA, 2509339 bp, Bifidobacterium dentium (residues 1-1,254,670 of 2,509,339)
  source 1..2509339: mol_type = genomic DNA
atggtcgatactccccatgatcctcttgatcaggctcgcggtgtatggtccgacgcactggcgttgctgcgccagaatcccaagctctccgcccgcgacaagggctggctggagaatgtggtgcccgaaggcatgtggggtccgaccatcgtattgtgcgtgcccagtgcggccacccagcaggcgttgcagaccgaactgaaccaaccgctgatggaggcgctgaaggattccgccgaacaggatatcttccccgcattcaaaatcgtgccgatgcagcagaccgtcgaaccggacatcgaggaatatccgcacttcgaccgcaaaccgcgcacccaacgcgaggaatcgacccaaggccagcttcccatccccgcaagcatgccggaacagccgttccgacccacagagcagggaacgttcaccagcggccagaacaggcctttgctggacccacagacgcatctgaacaagaatgccaccttcgatacgttcgtaccaggcgactccaacaggttcgcacgtaccgtcgcccttgccgtagccgaaggttcgggacacgacttcaacccgttatgtatctatggcggctccggtctgggcaagacgcacttgttgaacgccatcggcaattacgccctggtcaaggatccgaatctgaaggttcgctacgtaaccagcgaggaattcaccaacgaattcatcgaggcgttgggcgataccaaccagaattccggccaaatcaaggaattcaaccgccgttaccgcgaggtcgacgtactgctgatcgacgacatccagttcttgagcggcaaggaagctacactcgaacagttcttccatacgttcaacacgttgcatcaggccaataagcgcattgtgatcgcctccgacgtaccgccaaaagacctcaaggggttccaggcacgcctgatctcccgctttgaatccggactgaccgttgacgtcaagccgccggatctggagacccgaatcgccattctgcgcatgatggccaccatgaacggctccaacattcccaacgatgtgctcaatctcatcgcggagcgctttaccgaaaacatccgcgagttggaaggtgcgctgaaccgcgtgaccgccatggcctcgctcagcaaccaaccggtcacccgtgcgttggcagagcataccctgcaagatttcttcacctccgatgtggaaatcaagccggctgacatcatcagtcaggtagccaaatacttccatctgaccttcgacgatatcgtcgggcgctcccgcaccaagaacatcgccttggctcgtcaggtggccatgtatctggtgcgtgagctcaccagcatgagcctgaacgacatcggcctagtattcggcggcaaggaccacaccaccgtcatgcatgcctatacccgtatcagcgatgagatgcaggaaaagcaggaaatctacaactatgtgatggaactgacggttcgtctgaagcagcattcctctgaaaaataaggtctcaccggcattgtcattatctagtaaaatattttactggagtaaatatttaccgaagttgacacgccgtgccgcgcacaataatcgtcgaatttatccacatggttatgcacaaatgtgggaaaatcccgtgggtaagccgttgaaaacacctaattcgtccgtgggcaactcgtggatgcattaccgtaggttgtggataagacgcagacttgattctgtctgtggataagtcggcatgttttccacaaggcatcccaatgttatccacaatcgagttatccacctttgcccttgcaaataatgtggtcccggaacttacccacattatccacaggccttattatgacgaagagagttggttattgaaagatcaccgtcaccgccataagtggggaattccccatgatgcgcaaacaccgcgcacttcgctaaaatgacttgtagcctgaacgaaatgaggaatccgtcatgaaagtcgaaatcaactcccaagcgcttgccgacgcagtagcctggaccacccgcgttatcgacgcccgtcctgcaacaccgattctggcaggcatccgtcttgaagccatcgatggcactttgcagctctccgccttcaactatgcgatttccgcacgtcaccatatcgaagcgggcatcgatgaagccggcacggccttggtgcttggcaaactccttgccgatatcaccaagtcgctcccttccgagaagacctacctatcaaccgatggctcgaccatgaccatcacttccggcaagtccaccttcaccatgcagctgatgccggataacgaatatccggatctccctgtggttccggccaagctcggccaagtggactcccccacgttcatgcaggccgtcaaccaagcttccgtagccgtctcccgtgaagagaaccgcccggtactgaccggcattcgcgtgcagttccaaggcgataaggtcatcatgagctccaccgaccgcttccgcctgtcccgctcgagcttcacctggactccggaaaatcccgacatcaacaccactgctctggtacgtggagcactccttcgtgacgtggcccgttcgctcgacgagcatcagaacatcgtgctcgatttcgatccggagagcccttctctgctcggcttcgaaaacgccggccgcgtatccacttcgcagctgattgacggggaattccccgccgtcgaccgcctatatgccgacgaatacccgattcacgcgattatcgacaagcaatccctgatcggtgccatcaagcgcgtctccctggtcgccgaacgcaatgccccgattcgcatggccttcgccggacaagagctgacgctgtccgcaggcaccgccgatgaggcacaggccaaggagatcattgatatcgacatggacggcgatgacatcaccgtggccttcaacccgtcctatctgatcgaaggtctgagcgccatcagtgaaccattcgtccgcatgaagatgaccacggcggtcaagccggtggaattcaacggccagcaggaagcggattccgacgaatccatggactaccgttacctgctcgtgccgatgcgcttcaacagctgacggcattcaccgacatcagggctgaatatcgcctaaacgggcatattcagcccgtacttatatatgattcgagggttcccatccatgcacatctcacggctcgcgctcgaccactaccgttcctgggagcgttgcgtgctcgatttcgagccgggagtgaacatcctgcaaggggcgaacgggctgggcaaaaccaacatcgtggaagccgtggaggtgctgtccaccggttccagtcatcgcacctcatcctcactgccgcttatcgagagaggctgcgcctcggcaaccatccgcgcaaacgtggaagatgaccggaaccggcattcctatgaggtgaccatcgcggcgcgaggcgccaaccgagcacgtatcgacggtggcaattccctgtacatgagggatgtcatcggcaagattccctccgtatcgttcacccctgaagatcagcgtctggtatcgggagatccggccaccagacgcaatttcatcaatcaggccggtgccctgctaataccgcactatatggagcggctgcaacagttcacgcatgtggccaaacaacgtacggccctgcttaagcagctcggggaccgtggtgacttcgatcctcagtatggtcggcaggccgccctgagcgggctggagatatggaccggccaattcatcgacatcggcatggccttgacccacgaccgtgccacgctgatcgaacggctttccgaaccgttcagtcgtgtatatgcgtctctggcgggaatcgaccagcaggcattgttgcattatgagccttctttcgacgaagtgatgctctacgatgatcctgccgcggagatcagtcggcatttccagcgcatctaccccggcgaagtggcacgtggacagaacctgatcggtccgcatcgcgatgatctgacgttgacgttgcatggcatgccggctcgcgaattcgcctcgaacggtgaaatgtggacgatggcgttggctctgaagatggcattgtatgaaacggtctgcgccgaccagcagaccaagccgatcgtgattctcgatgatgtgttcgcccagcttgacgagtcccggcgcgagcagattctggatttcgccagacggcaggatcaggtgctgatcaccgtcgccgcggccagcgacattcccgcaacgcaggcgcatgtgatcgacgtggccgcgttacgcgatcatgccgacgatgacgatgcgctgggtgcgctgatggccacactggccgcaggacggaaggcggaagagcgctgatgacgaatcctcccgtatgcgacatactcaagctggaccaacgcaagttgcctgcggaggtgttcgaacgcgtctcacatcgtgcgggactgctgaaggaacgtgaacgcaaggcgagactagcgtgggagaatttcggcaaacccgggcgggatccgcagaaagtcggcaacatcttcggcttgatcgcaacccagggcaagtggacgccacatctgaaaatcgcgcagatgcagaatcattgggaccaggtggtcggtcgggagaacgccatgcacacctatccggtatccttgcgtgacggcatcctgacgattcgctgtgacagtccggcgtggactaccacgatgaactatatgattcccgagctcacgcgcatcatccgcgaaaaactcgaaggactgaccatcaacgaggtgcgggtgacgggcccacagcagcagtcattcagccgtgggcggatttctcggcgtacccgctactgaatctccgttggtttcacgcgcatcggggcggtgccttccccgctttccatgaacaagcggcgaaatcggctctattccgaggaatagtgcctctattgaggtgtccccctccatgagtagaatatcaagcagtgtatgtaaacgcctagaaggggcctttatttgcgttctaggtggtatcgcccgcgcaaatgaccttcatcggcgagaaaaatgcaggaaggaatctctgtggcagaccttgacgcggattcgctgaacgaatcagctgaaaacacgcaggaagatcagattcagaacgatcagctcgaagatgcgcagctcgacgactcattgtcgcccgaacactatgacgcctccgatctgagggtgctggaaggccttgaggcggtgcgtatccgtccgggcatgtatatcggctccaccggcccacgcggcctgcaccatctggtctatgagatcgtcgacaactccgtcgatgaggctttggccggctatgcgtcgcatatcgaggtgacgattctgccggacggtggcgtacgcgtggtcgacgacggacgaggcatcccggtcgacgaagtgcctggcgagggcgtttccggcgtggagaccgtgatgaccaagctgcacgcaggcggcaagttcggcggcggcggatatgcggtctccggcggtctgcacggcgtgggcatctccgtagtgaatgcgctgtccacccgcgtcgacatcgaagtgcgtcgtcagggcttccactggacacagacctacgtcgaccagaagccgaccgcccgtctggccaagggcgagccgatggccgaaggtgaatccaccggtacctccgtgaccttctgggccgacggcaagattttcgaaaccaccacctacgatttcgaaaccctgcgcaatcgtttccagcagatggccttcctgaacaagggactgaagctctccctgaccgatctgcgcgagcctgatcaggcgggcgacgaggtcgccggtgagcttgacgagaccgaaaccaagcatcagaccgtcacctaccagtacaacgaaggcatcaaggactacgtcgactatctggtcaagtcccgcaaggcgacgccggtcgaagaggacgtcatcgatttcgaggcggaagatctgaaaatcggcatttccgcggaaatcgccatgcagtggaccaccgcctactcagaagccgtgcacaccttcgccaacaccatctccaccaccgaaggcggcacccacgaggaaggtttccgagcggcgttgacctcgctgatcaaccggtacgcccgagagaagaacattctcaaggacaaggatgagaacctctccggcgacgatgtgcgcgaaggcctgaccgcagtagtgtccgtcaagctcacaaccccgcagttcgaaggccagaccaagaccaagctcggcaattccgaggccaagaccttcgtgcagcgcgtgatgaccgacaagcttggcgattggttcgacgcccacccgagcgaagccaagaacatcatccagaaggccatcgaggcctcccgtgcgcgcatcgcggccaagaaggcacgtgagaacacccgtcgtaagtcgattttcgaatcggccggcatgcccgacaagcttaaggactgccaatccaacaatcctgaggaatgcgagctgttcatcgtggagggtgattccgcaggcggctccgcaatccaagggcgcaacccgatcacgcaggccattctgccgttgcgaggaaagatcctcaataccgagcgcgccagcctggaccgtatgatgaagtccgaaaccatcgaatcgctgatcaccgccgtcggcggcggatatggcgaggatttcgatctgagcaaggtgcggtatcacaaggtcatcatcatggccgatgccgatgtggatggcgcacatatcgccaccctgaatctgacactgttcttccgctacatgcggccgatgatcaccgctggctacgtgtacgtggccatgccgccgctgtaccgtctgaagtggaccaagggtgcgcacgactttgtgtacaccgacgccgaacgtgaccgtgtgctcgccgaaggcaaggccgccggccgtcagttgccgaagggtgagggaatccagcgctataagggtctgggtgagatgagctatcaggaactgtgggaaaccaccatggatccggaacatcgcatcctgaagcaggtgcagatcgaggatgcggccgcggccgacgaaaccttctccatgctcatgggagacgaagtcgaaccacgccgtctgttcatccagcgcaatgccaacaaggtcagctggatcgacgcataagggacttcaaggcaaggattagaaattggcagacgaaaacaacaacaacgaagagggccagttcgtgcctgacggctccatggaaccgctaagcccgcaagaggccgacaacaccgattacggcctgatgaccggcgaacgcatccagaagaaggacctgcgtcaggaaatgcgcgactcctatctgtcgtacgccatgtcagtgatcgtggaccgtgcattgccggacgtacgcgatggcctgaagccggtgcatcgtcgcgtgatctacgcgatgtacgacggcggataccgccccgatcgtggctattccaagtgcgcccgcgtggtcggcgaggtcatgggtaagtaccatccgcacggcgattccgccatctacgacaccttggtgcgtatggcgcagtcctggtcgatgcgctacatgctcgtcgatggacaaggcaacttcggctcccccggcgacgatccggcagcggcaatgcgttacaccgaatgccgtatggcgcctcttgccatggagatggtgcgcgatatcgataaggacaccgtcgacttcctaccgaactacgatggcaagacccaggagccgaccgtgctgccggcccgcttcccgaacctgctctgcaatggatcgtccggcatcgccgtcggcatggccaccaatattccgccgcacaacatgcgtgaggtggccgaaggcgtgcattgggcactggaccatccggaagccagccgcgaagaactgctcgacaatctgatccgcattatcaaggggccggatttccctaccggtgcgacgattctcggtcacaagggcatcgaacaggcctaccgtaccggtcgaggcctgatcaccatgcgtgcggtcgtaaacaccgaggaaatcaagggccgcatgtgcctggtgatcaccgaactgccatatcaggtgaacccggatcgactggtcgtatccatccgtgaagcggtgcgtgacggcaaaatccaaggcattgccgacatgcgtgacgaaacctccggacgtaccggtcagcgactcgtgctcgtactcaagcgtgacgccgtgccgaaggtggttctcaacaatctgtataagcactcgcagctgcagcagactttcggtgccaacatgctggcactggtcgacggcgtgccgcgtacattgagcttggacgcgttcatccgccactgggtgagccatcagcttgacgtgatcgcacgtcgtaccgcatacctcaagcgtgaggccgaggagcgcgaccacatcctgcagggctatctgaaggcccttgacatgatcgatgaggtgatcgccctcattcgcgcctccgaatccgctgagaccgcccgtacgggccttatggatctgcttgatgtggatgaggtgcaggccgacgccattctggccatgcagctacgccgactggccgcattggaacgtcagaagatcctcgacgagcacaatgagctcatgcgcaagatcgccgactacaacgacatcctcgccaagccggaacgccagcgcaagatcgtgggcgacgaactcgacgaaatcgtcgccaagtacggcgatgaacgccgcacccggattctgccatactccggcgaaatgaacgtcgaagacctgatcgctgaagagaacgtggtcgtgaccgtgacccattccggcttcatcaagcgcaccaaggccgacgagtaccgtgcgcagcaccgtggcggtaagggcatcaagggcgccaagctgcgtgaggatgacgtggtcgatcacttcttcctgaccagtacgcacaactggctgctgttcttcaccaacaagggtcgcgtataccggctgaaggcctacgagctgccggagggatcgcgtgattccaagggtcaacatgtggccaacctgctgcagttcggtccggatgaggccattcagaccgtattgtcgattccgaactacgaggtggccaagtatcttgtgcttgccacccgttccggcaaggtcaagaagaccgcgctggccgaatacgactcccctcgtcaaggtggtctgatcgcagtgcgattgatgaccgacgagaacggcgagaacgccgacgagctgattggcgctgcactgtgcaatgccgaagacgacatcatcctcgtctccaagctgggcatgagcctgaagttccaggccgatgacgagcagctgcgtccaatgggccgccagaccgcaggtgtgcagggcatgaagttccgcgaaggcgacgagctgctggccatggacgtggtctggggcgattccgacaaggatttgctcgtggtcaccaatgaaggcttcgccaagcgtacggccatcagcgaatatcgtttgcaaggccgtaacggctacggcgtcaaggccgtgcagttagccgaaggccgtggctccctggtgggcgccgtgatcgtggaggaagatgaccaggtcatggccatcatgaagtccggcaaggtcatccgttccaacgtcgccgaagtcaagcgcacgggccgcaacacccaaggcgtaacgctcgcgaagcccgacaagaacgacgaaatcatctccatcgcccgtaatgaggagaaggagaacgaagacgatgagccagccgaaggagcccctgcggaagcggtggacgggcaggccgtcaccactcaatcaggcgagaatgtagaggcctcggccaagaccgagtaatcgtcggcaaacactggtagcctcagcctaagaagctgggcataaccttgcaaggagcaacgatgagcgagaacatggaagaacaagagccgagcgtacagtctccggcatccgaagctcaggaaaccgaaaaccacgcccctcgcgtggcccgttccgcttcgagccagccgctgatcggcgccgagcaggtgcgtgcccatgaaggtgcggtcaaatcggtgcagggcaagagccgtcgtggtgcgcctcgtgcacgccgcatgagtctgtccctgacgcgtatcgatgcatggtcggcggcgaaggtggcattcatgctttccatcgccggaggcatcattcagatcgttgccgcggcactgctgtggatgatgctgaatgtggtcggcgtgttcgaccaggtgacgcagattgtgtcctccactggcttggatgccggtggattcgacctggccaacgtgctgtcactgagcacggtgctgagtgcggtcaccatcttctcgatcatcgaggtgatactgattaccgtgctggtgaccatcgtcacgctgctgtacaacgtggtgagcacactggtgggcggcatccacgtgactttgggtgatgactgatccggacgcacgccaacaagcgtaagaaggcggcacttcctttcggaggtgtcgccttcttcgcattcacatatgcccgccggtgtttgccgccgtgtttgtccgattctggagaatcggacaatgagagcgtgaaaagcaccccacggatgtccgattctccagaatcggacatgtaaggcatcagcaaatggtcttaagtgtccgaaaatccagaatcggacatcttggacagataacacaatgccgatccacgcggatagagaggaatcgatccgcgtgaaccggcaagttcggttgagtgggctatcggactagagcacgccctgggcgaccatggcgttggctaccttgacgaagccggccgcgttggctccgagcatcagatcgccttcatggccgtattccttggctgcggccaaggagctggcgacgatgttctccatgatggacttcagcttgtcatccacctcttcaaagctccatgagagacggtaggagttctggctcatctcgagaccggaaactgccacaccgccagcgttagcggccttggcggggccatagagcacgttattggcctggtagacggcgatcgcctctggagtggacggcatattcgcgccttcgcacaccacggtgcagccattggccacgagcgtcttggcggattcctcgtcaatctcgttctgagtggcgcatggcaatgcgatgtcgcacggaaccgtccacacacctttgcagccctcgtgatattcggagcccggcacacgctcggcgtattccttgatacggccacgatgacccagcttgatgtccttgaccacatcgagctgaatgccattcggatcgtagatgtagccgttggagtcggatgcggtcacgaccttcgcaccgagagcctgagccttctccgtggcgaagatggctacattgcccgatccggaaatggctacggtcttgccttcgaaggaatcattcttcagcactcgcagggcctctgcggtgtagtagcacagaccgtatccggtggcctcggtgcgtgccagagacccgccgaactcgagatccttgcccgtgagtacgccggagtattcgtcgcggatacgcttgtactggccgaacaggtagccgatctcacggccgccgacgttgatatcgcctgccggaacatcagtgaactggccgatatggcggcatagttcggtcataaaggcctgacagaaacgcatgacttcggcatcggacttgcccttcgggtcgaagtcggaaccgcccttgccaccgcccatcggcagggtggtcagggaattcttgagaatctgttcgaagccgaggaacttgatcacaccttcgttcacactcggatggaagcgcagaccgcccttatacggtccgattgcggaattgaactggacgcgatagccgcggttgacctgcaccttgccttcatcatcggtccaagcgacacggaatttgaccacgcgctccggctcgacaaggcgttcaagcacgcctgccttctcatattccggatgcttcgcaactactggttcaaggctttcgaaaacctcaagaacggcctgcaggaattccggctggtcgccatcacgttgttcgacctgtgtgtatacgcgcttgacgtactcgtcagtgagcatatttttccccttcgggatagttgggttatcaataagacggtctcattctaggtatgcaaggttggacgtcacaagatattgctcaggatttggctgagagtttgatgtccgattctccagaatcggacatccagacacggtccgggggcctgtgaatgtccgattctggagaatcggacagattgagtttggcgtataaacagacacggtaaggttgatagcaggacgattgatatgaaacgcaaggggttatgggtcggatgagtgcgaacaaagcgggccgaaaggcaagcatgggagacgtggccgcagcggccggcgtttccaaaaccaccatctcacggtatctgcatggcgaattcggttacatgtcggaacaaaccaaagcgaaaatcgagggtgtcatcaaagagcttggataccgtccgaacaaaatggcccaaagtctcaaggctacggtcagccatatggtcggtgtgagcatagcggatatgggcaacccattcagttccctgctgatcaaaggaatccaggaagaatgccgagcgcgcgatgtgcagttgctggtcagcgattccaacaatcaacccacattggagcgggccaatatcgaatcgttgctcgatgcgcaggttgacggactgatcgtcaatacggtcggtaataacgatgactggttggtgcgatttcatgatcgcgcgaatcgcaaaccggtggtgatgcttgatcgcattgtgctgccgttgatttatgacagcgttaccaataacaatgacgctgcggtgcgtgagatgctggaatacctgaaagggcaaggattcgcatatgtcgtgttcgtaatgcgtcctggcgagggcatcagtactcgtaccgcgcgtcgtcaggcagtggaacggtattgcgatgatttgggccttggcggtgaagtgctggtctatgacgacgggattgatggactgcgttcgagaatcgtcaacctgttggaattgtgcggaaatcggaagacatgtctgttcgccaacaacgacgaaagcatgcgggacatactggaagctacctcagcgggactgcgaaggcatgtgggtgtgtgctcgtttgccgatgagcattgggccaaatacagcggtcccggcatcacgtgtctggatcaagagcccatgctgatgggccgcagagctgcacaaaagctgttcgcacgtatctatgacgggtcggaggaaccgtgttccttggatgaggtaccggccagactatgcatcttcgcatcgactgaaatctaattgatcggattccttttcagcgggaagggaatgtgctgtaaataagcggaacacgccgtagttaaccggtaaacaaaatctgctgtatgctcatagttaaccggtaaacgaaaccgataaactaaaacggtgcactatcctatctgatgcattgaccccatccattaccagctcaaggaggagcggaacatgatcatatggatcatgggcatattgctgattgcctcattcatctgctttgtcatctacgcgatgaaaggcggtaatctcaccattggattcttcattctcaccattgtgtggaccctcgtttattttctgggaataccattcggcataggaaagccgttcgatgtcatcgaggagaccttcgctcagccggcgttgacctacggttccaccatcatccagatcatttgcggtgcatggttcggacgtgtgctggtcgacaccggcatcgcggcctccatctcataccgcacagccaaggtcggtgagaagagtccggtgctggccaccatctgcatggctctggtcacctgtctgatttttaccagtgcgtatggggtgggttccgccatagccatcggcgtgatcctgttcccgattcttggtcgtctcggtgtccccaaacgtatcgcggtaccggtattcaccctctccatcggtgcggcaatatggatcaatagcgtgttgttcgtacaatttgcggccttctatcaggactataagtctcctgacgggcagatcgtggaatggggaaaccactacctgcgcttcggcatctcggccatggtcgtgcagatgatcggcgtaatcattttcatcctgatcaataccaaatccatcaaaaacggcaagccatatgaagtgggggaccctgccgaccaggccgctgaaatcccccaggtgccgatttggacctatgtgttgcctatagtaccggtcgccctgagcatcatcttcgaatgggatgctgttccggcgctattcctggcttccattgccgccttcttgggaaccggacatatgaaaacctacagaggattcgtacgcatcctcaattccactgcgaaaactgccattggcgacatcggtagcctgatcatcatgttgctcgtgctgcgtttcttccaacatgcagcggttaccgtcatggccgacttcggtccggcactgacttccgtagtacccaacaacgaattgattcttgccgtcacggtgtgcattcttgcaccgcttgcccttttccgcggccctctggaactgtatggcgctggttcggccgttatcagcattctgatgggcatgggcatctttaacgcatggttcctgttcgcactgctcgtggtaccgtccatgacctgcatctccagctgtgtgacgcagtcgtggaatatgtgggcggtcgaatacaacgaactcgaacccaaaaccttcctcaagaacggcgtgccggtgtactggctatgcacattccccatcatggggctcgcctccctgctgctgttctgaatgcacataacctcgccggttgttcgaatcatcctgtgacggatgaccggcaccaccacatgagaatcaaggatttcaatcatgaacattatcggtatcaacaccctcgtctacatggatgcactgcgtgacggtgccacacaatccgagctgctcggcagcatcgcggaacttggcgtcacccttgctgaagtccgccgtgaatacatcgccggagacgacgaattcaacgccatcgcaaacgctgcgcggatcaacggtctgcggctgttctattccgttccggaatccatcacggtcaacggtgacgtcaatcccagattcgaagagttccttgatgaagcgcaacgtatgggcgcatccaatgtgaaattcaatcagggagacatcaatgatgtggatttggaggtgttgcggcgtatcgatgagtcatcggctgcgcacggcgtgactttgaccatcgaaaatgatcagacgccggaaaacggtaccttcgcatgtaccagcgcatcacttgaccatatcgtcgccaatggtggcaaggtgggctacaccttcgatctgggcaactggtattggcgcgacgaagatgccgtccgagccttcgacaggctgttgccctacatcaccgtcttccatttgaagaatgtcaacggggcttccgacaagacacaacttgcgacgaccatgctcgaagacggcgtgatcgactggaagaagatgctgcaacgtctaccggaaacggtgccggtcttcctggaattcccgattccatcggatcgactcgccgagcagctatccatcgtacgcaatgcagtcaatcaagcatcgcactgaaccccttatgaaattttccgtacaacttccatagaaccgcgaaatgaaggaactgcaatgtctgaagtcatgaccatcggcgaacccatggtaaatctcatcgtcgattcgcaagaaacctatctggaagcccgtacactcccacgggagatggcaggcgcggaattcaacgtggccatcggcgtaacgcgccaagggcattccatacgctatgtgaccacgctcggcaacgattggcagggcgatctcatcctcgactatatgaatggcatcggtattgatacgcgtaacattcgccgcgtatccgaatccgcaacaggataccagctgaaggtgcgatccagtgatggcgagccgaaagtcatttatttccgttccggttcggctgcttcgcggaccacgccggatattgttgatgacattgatttcgacggcatcaagattctgcatatcacaggcatattctcagcgttggcgccgaacacgtacgacacggtgacccgactggtggatacggcgaaacagcgtggcgtgaccgtgctattcgacccgaatccccggcctacactatggcccagcgaagaggccatgattgatgccactaacaagctggctgcgaaatccgatgtgttcatgcctgggttggaggaaggtcggctattctccggcaagaccggaccacgcgacattgccgagtggtacctcgatatgggcataggcaaggtcatcgtcaaattgggcgatgtcggctccgtactgtttgaaaggacctcggacggcgacttgagtgaaacggtcgtacctagtttcgtcgtaaacgtcgtcgataccgtcggcgcgggagatgggttcgcatcgggcgtcatcacggctttgctggaagggctcgacaatgagcggttgttggaacgagccaatgcggtcggggccattcaggtcaccagcgtttccgattccgaaggtctgccgacatccgaggaattgcgcgaattcatcgcattgaccccgcgtaaggaaatctcgttgtaagtgtcccgacactcacaatgcaacatgcaacatatgtggcatggccaatggaaggatcatcatgaaactacaggttgctatcgatcgcgttcccgtggaacgtgccatggaaatcgtgaagaacatcacctctgaagcgaacatcatcgagatcggcacttctcttaccaaggaattcggtatgcgtgctctacggcccgttattgaggccgcggaaggtgtcgccgtgctcggagacatcaagacctgcgacgagggcaaatatgaattcgatctcggctaccgatgcggattttcgtatctgacggtcatggggtccgcctcaatgggaacgttggaggcatgcgcccgctccgctgcggaacatgatggcctgatgatgattgatctgctggaatgcgatgaggcgcgcattgagcgcattagcggctttacggacgcgatctactgcttgcacacctccactgatgagggctctactgcagatcccgtcgcacaggtgcgtgcgttcaaggcacggttccctcagattcagcatctcgcgattgctggaggtatcaagaaacatcatcttgccgccttgtcgcaggaaaacatcgacatcgtcatcatgggttcggccatcaccaaggccgacgatattgcaatggcatgccgagcatgcaggaaggaaatgaaatgatcgacaacaatcgcgttctcgaacggatcgtcgaagaaatccaaggcgtgatagccagaatggatgaaaatgaccttgaacgggccatggcattgattaccaaaggttcacgcatctatgcggcaggggagggacgctccggtttccaggctcgcagtttcgcgatgcgcatgatgcatatcggctatacgagctacatgatgggggaaaccatctgtccgtccatgcgtgagggtgacgtattgctggccatctccggttccggtaaaacccggcgtaccgtggaagacgccgaagccgccaaaaatcttggcgtacgagtgatagcagtaacctccaaatcggattcccctcttgcttccgtggcggatgccgtgattgtggtaccaggtcgggtaaagggcgaatccagtggttccatccagctgttgagctcgctattcgaccagtccgtgcatatcgcgctcgatgcgctatgtctgatgttgtctcgccgagatgacgtgtccgatgccgacgccaatgccaaccatgccaatgtggagtgaatacatgcgttgagtgaggcattgacaccgcatgggaaacgtgacgatgttccgctgtgaaacaagcaggtatacaacggcggagcatcgtcattttttgttatgtctggatgtccgattctccagaatcggacatccagacacggtccgggagcctgtgaatgtccgattctggagaatcggacagattgccttagcgtatgtttcctataggattgggggatggaagactgcggaggggttaacgaaggtgtcttccgaaaataagaagaacaataacgggaaaccccgggaggaatcatgattgaaggattcaagaagttcattgcgcgcggcaacatgatcgacatggcggtcggcgtcgttatgggcggtgccgtcaccactgtggtcaacgcgattgtggacagcgtcatcaacccattcatcgccatgatcttcggcaaaccgaatatggacggtttgctggcgatcacgttcaatggtgcgaccgtgtcgttcggcgcggtgctcggcgcgatcctgaacttcctgatcatcgccgtcgccgtgtatttctgcattttggtgcccatcaataagttccgtgatgtgaccgaggctctgctggccaagaccaagcttgccgaagataagaaggccgaagaagaggctgccgccgaaacgactgccgaggagcagacggtgcaactgcttcagcagattcgcgacgaactcgccaagcaaaacgcggctcatatctgacgatggaccggccttctccacctcaaacgacacctaaacgggtaccgattcgcgtacctgatacggccaatccggctacgttcgtagcgatgccggtcgttggagaaaaacaacgcaaaacgttgggattacagggattcatgtcgggccgataggaaatgaaaaaaggcttccgattgctcggaagccttatctgtggagctaaggggattcgaacccctgaccctctccatgccatggagatgcgctaccagctgcgccatagccccgtggagctagccgggttcgaaccggcgaccctctgcttgcaaagcagatgcgctaccagctgcgccatagccccataggtgaaaaaagcggctatgccgcttcgttcccatctacgtgggcccgggaggacttgaacctccgacctcatccttatcagggatgcgctctaaccacctgagctacgggcccaactcgctgtaccctcaagcacaacgagttgaaatattacccgaagcattttgaaagtcaactcaggggtgtatttcggcgtgtcgcaagatggcgtatcggcgaactggaagaatcgatccgaaagagagacctatctgaaagatgatgtatgacccgggcatgcgacacaatggcaggcatgtcatacagccgtcagcctcatgcccgaagtgatagcggaagggtacgcaaccgcaatcggatactctccgagaagaatgcagaaatagcgggaatgacggtacatatcatccgcaaaccaatcaagaatatgtatctgcggatcaaaccgccgaatgccgacgtcgagatttcggcaccgcaacggatgtctgcagataccatcgaacgattcgtgatcgaacgaagatcctggatcgaacgggcacggcagaagatgctgctggcgcgggagatggaaatccgacgtgggaaggcgttatcggagcaacgcggcttatcggacggcaatcccggcggtccgctgaccttcgtctggaatgatgagaacaaggcacaggcgcggcgcaacatcgatgctcgactgccggccctgcttgcgatatgggggccgattatcggtcgcgagcctacacatatcacgttgcgtatcatgacatcccgctggggctcatgcacgccccgaaccggtcgtatccggctgaatctgcagctaggcctgatgaatccgaaatttttggaatacgtactggtgcatgagatgacccatctatgggagaacgggcacggagccggcttccagcgacgtatggatgcctatctgccgcagtggcgccaactgcgacgagacatcaaccggcatgtagtgctgtaggcgcatcgcatgccgtgaaacacgatgcggaacacctcgtgaaaaaccgaaggtgccgccgaccgcaaatcggtcgccggcaccttcatcacgggcgtgaaaactcaatcaggccaaatggctacgcatgaaccactggaacttctcaagctcctgcacatggtcctgcatgatgttggagctgatgacgtccaactcgtccagttcggtgatggccgtacggctcgccttgatgaactcgctgtaataggcgtcaagggccttgagatagtcaagggtgttgacccggccctccaactcgaatttcggccaagtgcggaagcgggtgatcgcatccgcgcgtccatcgggtgagcctcccaaagtggcgatgcgctcggcggtctcgtcggccatgttgagtacggcttcaacctgcggatcgatcatttcatgtacggcgatgaaattctccccggtcacgttccaatgcgcatgtttcaacaccagtgcggcttcctgctcctggctcaggcggttctgcagaatgccgatgatcttttccgaggcggcctcgtcgagccccggaacaatgaatgtcaatgccatgatcgctgtccttccgttcaatgggattgcgtgcatacggtgtgcgcaattcaagtctagaaaaggcggaaggtactggatagtctgtaagccgaaggcagagggacggcctactcgttgtcggtatgacggcgtacctcgatggtttcgatgcgtcggccgtccacattggtgatggtcatgtcgtagccgtcatcggaggtgagtacgtcgccgacctcgcccattttgccggtatgtgcgagaaaatagccggctaccgtctcataggggccatcttccagttcgatgccggtcagatcggcgaaatcctcaatcgtcataccgccctcgatggtggccacaccgttcacgaatgcggtgcgttcggtgcgttcgccgcccttctcctcgggtagatcgtattcgtcgcggatgtcgccgacaagctcctcggtcatgtcttccagcgtgacgatgccgtcggtgccgccatattcgtcgatgacgaccgccagatggatgccgcgcttgcgtagcagttcgagacttggcagcagtttggaagtgcccggcagggagatgccctcgcgcgtcacgtcggctacggtcttcgcttccggatcgcggatgtcgagcaggtcgcgcacatgcacgaaaccgagtacgtcgtcgaaatccttgccggtcacggggtagcgggaatacggcatttcgcgtacataggcggctgcttcgccaatcggcatgctgccgtccaggaagaccacgtcggcacgaggacgcatgacttcggccacaatcgtctcggaagcatcgaatacgtcgtcgagaatggtgcgttcgtccttgctgagattggtgttggtgttgacgagcacgcgcagctcctcatcggaaacctcgctgtcggtctcattcgggtcgaagccaagcaatcgcacgatgccgttcgtattcttgccaatcagccagatgatcggcttgcagacctttgcgaacacatggatggccggcaccacggcccgtgcgatctgttcgttgcgttgcatggcgatgcgtttcggcaccagttcggagatgacgatcgaacaatatgagatgatcagcgtcagcacgatggtggtcaggggagcggccacgcttttcggtacgccccaaccttcgacgaccggtacgatatacggcgctatcgaggattcgccgaacgatgcggacagaaagccggacagcgtcacgccgatctgtacggtcgacagaaacgtgttcggatcgcgtgcgatctgcgccacccgcttgcctcgagcgtcttcctgctccatctggtcgatctgcgacccacgcaggctcaccaacgcaagttcggtgccggcgaatacggatccaagcagtaggaagatgaagatcagcaggatgttcaagccaagtgacatgcttccaatctaaagcaacggcatgtcaaacgtcatttcagaagctcagcacctccaccttgccggagtccagctgatagcgggcgccgacgatcatgagtcggtcggaggcgagtgcctgctgaatcgattcggagtgctcgaccaactgttcgatggtgcgtgcaatgtgtacgcgttcgaaatcctcattggattcgagctccgattcgtgcgcctgccagatggagaagccgacggtgcgcagcataatcgaatcggcattcatgatgcgttcgtcaagatcggcgacgctgtcggctgccatgagcgaatcctcggcactggcggtcagattgtgcaacagggcgtcgtattccttgacggcctgtttgatcgcaccgcaattctggtggccgagcactaccagcagacgtacgccgagtacgtccaccgcgtagtccaaggaagcgatcacagcgttgtcgatgacttggcccgcggtgcgtacggtgaacagatcgccgatacctgcgtcgaagatgatatcgggacttacgcgtgcgtcggagcaacatagcacggccgcgtccggctcatgcgtgtcgatgagcgcctcacgcgcctcggcgctgcggttcggatgttccggcctgccttccgcgaatctgcgattgccggccagcatgcggctccatacgccgcttgccgtgccctcgacgtcattctggtccacaaacagttcgtcatccgccattgatgtgacctccattgtttaggctaggaacatcatacggttcggactggccgtttgtttgccatatgcgttatttcaccttgatgacgtcgataaggttgttggtgagccatgtgcctatggggaagaggccttcaacgtcacgcatgtcggttgataccagtctgtccttgacgctggcgtagtccaccgtgcctccggactgcaggtcggtgagatccgcatacttcgcatctgtttgtggtgaaatgtcgctgcctggcgatgccgcgatgaccggatactggtatgcccacacttcgatatgctgggcggacgtcatcggtacccaaccgatgacggatctacctatatcgcccatagctatcggtttctcgccattggcgacgcggatattgcagatcggatgatccatgtccggataggccttggacagcagcgttacggtatcgccgtccacatgcgccgtgacacggtcccgccagtactccggcatgtcgaattcgtatgattgcgcctccacatgcaacgctggttccggtgacggcgattcggtctcggatggtgtggcctgcttgttcgtctgctcttgcgattgcgaggattgctttgcctgtggctgtggtgtcttggtcttcgtgctcgcggacgttgccacagttgcgggtttcgtgccccacatacccagaccgtgagtgattgcagcacccgtcaccgccagtgcggatatgagaatgattgcgatgattgtggttgtacgttttcccgcctgcgccgcgggatgcacacgtttcatggaaacctccttgtctccatctcaatgctaccccgggaagcgagtcatgcccccgaatgcaagaagccctcgtccgcttggatgggcgagggcttccgagggatctggagcgtgaatcagccggtgttctgcaggcctgcagcaacgcccgaaacagtgcacaggatcaagtaggtgtaattctcctgctgaccgtgggtcagttcttccttgtccacctgcttgcgcagcgagccgagggcgagcacctgggtaacggatagcgcgtccacatacggcgagcggatgcggatggcctgaccgagcacgtggcggtgctgcaacggccactcatcgccgacgatcttgagcacccattcgcgggtgagctccatctcgtcgagcaccttcttattgaggtcttcacggtcgccgagagccagatacatcttggcgatgcgttcgtcggtcttggccagcgacatctcgatgttgtcgatgaacgtcgagaacagcggccattcctcgtatgcctgacgcagggtcttaaggtcgccgaattgctcgcatgcggtgccgagaccataccatgcggccaaattgatgcgtgcctgcgcccaagagaagatccacggaatggtgcgcaaatcgtcgagggacttggcgccgagaccacgcttggcagggcgggaaccgattggcagcaggccgatttcggtaagcggtgtgacggtggagaaccacggggcgaaatccggcgtattgagcaggtcgaggaagcggttatgcgcggcctcgtcgagcttgttcgccatgtccgcacacttttcggtcatgtcggtgttgcgcttctccacgctcggagcggactgcagcaacgtcgcggctgcgacggactccacgtggcggatggccagcgccgggttgccgtagcgtgcgaagatgacctcgccttgctcggtgagcttgaaacggcactttacggagccgaccggctgtgcgagcacggcacggttggccgggccgccgccgcggccgacggcgccgccgcggccgtggaacagggtcaggtcgatgtcgtgcgattccgcccacttggcgatacgctcctgtgcggagtgcagggccagcgtcgcagaggtcgggccggcatccttcgaggagtcggagtagccgagcatgacttcgagcttgccgccggtggccttcagacgggcctgtacctccgggatcttgatcatgtcttcgagcacgtccaccgagttctgcagatcctcgagctgttcgaacagcggaatcacgtcgatggtcggaacatcctcgggatgggagaacgcaaggcggttcagctcatacacatccttgatgttctgggcgctcttggtgaaggagatgatgtaacggcgggcggccttgatgccattgcgcttctggatggcgccgagcgcacggaaggtgtcgagcacctcgtgggtcatcggctgcagcggtccacgttcgccgtgcagaccatgctcgcggatgtcttccagcgcgcgcgaatgcaccacggaatgctgacggaactccatctcgaccatatggaagccgaaggtttccgtctgccagatcagatcctgcaccgggccgtaagcggaacgcttggcgttggccgcagccagggaacgctggacgatcttcagatcctccaggaattcatcgcaggagtggtacatcaggtcggcgtcacgctcgatggtgtagtgcagacggtcggccatgaccagcatgacggcgcgatgcatttccttggtggaaatcagggcggccttgtcggtgagcctctcgctcatctccttctggtggttccacaggctcttgagctcgtcgcttggcggagtggtgccggcctccatcgtcaggtttttgccgacggtgcgggtctcaatctccagtgcgcccagcacatgatcgctgaacttgcgggccacctgacggcttaccttggcggtgacattcgggttgccgtcgcggtcggaaccgatccagcttcccggatggaagaacgccgggcacatcggcggaaccaagccggccttgtcgccaagcacccaatcgtcgaaacgacggtagacctggggaatggtatagaacagcgtgttgtcgaagatgtcgagaatcgtatccgcttcctcgacgggggtcggcttcttcagcgcgatcggggaagtgcggaacaaggcgtcgatctcattgaacagacggcgggaattttccttcttgtccgagccgccgagcagcttatgcgcctcaagcaggcgggagatgcggcggatcttgccttccacggccttacggcgcgcctcggtcggatgtgcggtgaacaccgggtggaactcgagcttgtcaagcagatccctggccttggccggacccagctcgttaatgagctgatgataggcgccggtcatttcgttcaccggatcgacggcctggttctcgtccacggcggtttcgcgcttgtgcagcacggagactcggtagttctcctcacacaggttggccagatggaaatatgttgcgaatgcacgagccagcagctgggcgtcatgcatgtccagcttgtcgacggtgttgaccacgttctgcagatcgtcctgatcggggttggtgtccgtcagaatgccggcgaagcgttcggcgctggcgttcaaggcatagccacgaacttcatcgaagcttgccaacagctgttcgtcgaattcgccgaggacttcgcgaagaatctgcaggcacagatccatttcctctttgagagatgctggaagatcgcgctcttcgggacccttggttccggtgccggacgagacgatggccgcgtccgctggcgtgatctgttgatcgttggttgtcatcagacctccttctccaaaccatcgggttgctcggtctgtcggtccttcgcggctcctccgcgattgttttggccgtctgttgcgagcccacagccctaagtttggttaagtaatgcgtgaacattgtaggcgtgcgtaatcgacacttgtattacgaacccgtgagatctgtccgtattccgggcaatgaatgtccgaaaaatgaaatcaggggagcggaagaaaaccttgcggccagtccccgcgctagacctgaatggtgtgagctcagaacatcaacatgacgagaatgctgaaaacagtgcgaaggccgtcagcaaattccatactcattccattcctctcgacatggaggacatcgaacgtgactgggacaagccggttaccgaagccggcatcgcagccaaggcaagtgtgatcgtacgcgtcggcatgctcgatctgggcgcaggtacgggaagcttccgcgtgcgcgaaatgatgcatcgcatcgcctatccactcggcgttcacgtacgggcggacgtgaatctcaccgacatcgaagcctcctgcaccgatggcaaggaccgcatcacggaagtcatcgacctgccgaccaccggcgtcaacaccgaacgcatctggctgcttgaacacttcgccgactggttcaacgtcaatctcggcaagggttccatgtatcacagccaatccggcgtttccgaagggctgatgcaacatctcgacaagaaggacgcctcgcaggtctccgcggaactgtcgaagaaactcaaggaacagcagaaggccgaacagaatcaggaaggttctgacgatccggtactcgacgcgctggagatggtgacggaacgtgccaaggacgaggaatcgctcgcacacccgttgcacctacgcgacatcgaagaggccgaatatcgttccgaccacgccaattcggcacagtggcaggatacggcacacggacgattcaaggaccgccatcacaaaccgccgaaaggccagtatgcacagcatttcgaccatgtaggcaaggccgaggacgaccaggcaggcatcaccgtgcgccaggcgcacgagcgactcgacatgatcgaacatcgcaagccgctttattccccggcgttcgccggattcgcctcggcctgcgcctgcgcatccttcgtgtttttgctcggcggcggccccttcgacatggtcggcgccttcatcggtgccggtctcggccattggctgcgtcggcgtctgttcgcccatcatctcaaccaattcttcgtgaccttcgtatgcgtggccgtcgcggcgctcgcctgcaccggcacattgcgactgatcgggctgttcaacccgatagcgctgcaacacgacaccgcctacataggtgccatgctgttcgtgatcccaggcttcccgctgattaccggcggccttgatatggcgaagatcgacttcccgtcaggcgtgcagcgcatcacctatgtgttctgcatcatcctgatggccacattggcgggatggatggtcgcctccatcgtgcatctgaatccgcagggattcgagcctctcggcctcgatcccataatcaactgcctgctacgcatggtgttcgcgttcatcggcgtatggggattctccgtaatgttcaactccccgcagcgtatgtgtctggtcgccgcgaccatcggcatgatcaccgacaccctgcgtctggaaatcgtcgacatgggcattcccgccgaagccggcgccttcatcggtgcgttgcttgccggtctgctggcctccgcatggcgctccgcagtgcatcatggtctgctggccccgcatcttggctatcctcgcatctgcctgaccgtaccgtccatcgtgatcatggtgcccggcctatacatgtatcaggccatgttccatctcggccagttcgatacgctgaatgcgttggattgggcattcagggccttcatggtgattctctgcctgccgatcggacttgcgatggcacgagtgataaccgacaagtcctggcgttacgacatctgaggtcctgccatcggaggatcacgcattatgctctcgctctgggatgcaatgttgcggcggcgtgtgatactcagtcaagaggttaccaaaagcacacattgttaagagggagaggtacgtggtctccaaagatttctgggtactgctggccatggtcatctatttcgtggccatgctcatcatcggattcgtctattccaagcggtccaactcatccacacgccagtacttcgcgggtggtcgtggcgtcggcccgtggctgacggctctaagcgccgaagcctccgatatgagcggctggctgctcatgggattgccgggcgtcgcctacttcaccggtgccgccgatccgttatggacggcgttgggcctggccatcggcacctatctgaattggaaactcgtggccagacgtctacgtcgctattcggtggtcgccggtgatgccatcaccatcccagacttcttctccaaacgtttccacgataggaagaacatcgtctccacgatttccgcgcttatcatcctcgtgttcttctgcgtgtatgtcggcagctgcttcgtaaccgtcggcaaactgttctccacgttgttcggctgggactaccacctgaccatggtgatcggcgcggccgtcgtgttcgcctataccgtcatcggcggctacctgtccgtggtggtgaccgacttcatccaaggcctgctcatgttcttcgcgctggctgtggtcttcgtgggctcggtggcctccgcgggtggtgtcgacaacaccgtggccttcctgaaggccattccgggcttcctggacggcacacagatggccacgccggtcctcaacgatgccggcgagcagatcgtcaaggccgggcaggccatgttcggcgcgccaaccgactacggtgtgatcaccatgatctccatgctggcgtggggcttgggctacttcggcatgccgcaggtgctcgtgcgcttcctgtccatccgcagttccgaggaaatcaagaagtcccgtatcatcgccaccacatggtgtgtgatttcacttgcatgcggcgtgtgcatcggcctggtcggccgtgccatgatgccgacacagttcgctacgcaggccgccgccgaaaacatcttcatcgtggtggctcaggcgctgttgccgagctttatgtgtggcgtcgttgtatccggcatcttcgccgcatccatgagctcctcgtcgagctatatgatcatcggcgcctccgcagtcggcgagaacatcttccgtggactgctccatcgcaaggccaccgatcggcaggtcatgatggtggcgcgcatcacgctgctggtcatgttcctcttcggcatcgtggtcgccttcgaccagaactcttcgatctttcaagtcgtttcgtacgcctgggccggcctcggagcatcgttcggcccgctgatgctgactgcgctgtattggcgccgtaccaacaagtatggtgccattgccggcatgatttccggcaccgcgatggtgctcatctggcacaatctcatcaagccgatcggcggcgtgttcgccatctacgagctactgccggccttcatcgtttcactgctgtgcatcgtggtggtctcattgctcacaccggcgccgagcgcagaagtgctgtacgaattcgatcattatcctgacgatccgaacgatcgtaaggtcgatgacgatctggtcgccgctgaaatcgcggcgggggagcgtcgcgcgcagatgtaaacgcatatttcttctatctgcgttatagatggcggatgcaacaaccttgagggcgaatactcgcgcgatatataccccctaactacttggttcctgtaaccatccgccatctatagtgcagatatgaagatgccggatcgtgaattcacgatccggcatcttctgtttgttggcgtctcagtaacgcatgcccatggcctcgcgtacctgctccagcgtttcgtcagcgatttcgttcgcacgcttgttgccatcatgcaggatgtcgcggatggaatccatgtccttggccagctcggcacggcgttcacggtgtggtgccaggaactcgttcacggactcgatcacgtactgcttcagcgcacctgcaccggaatcgccgatctcttcggcgatctccttcggatcacgtccggtcaccaggccggcggtggtcagcagtgcggaaacctgcgggcgggcaatcggatcgaaggtgatgcgtcgctcggaatcggttgggctcttcttgatcagcttggtggtttcctcggcggtggcgcccagcatgatggaattgccataggacttgctcatcttgcgaccgtccagccccgggatctccggcgcctcggacagaatcgcggccggctcggggaacacaggatgcttcttggcgtagcgttcgttgaaacgacgggcgatggtgcgggtgatttcgacgtgcggcaggttgtctttgccaatcgggaccacgttcgccttgcagaagaggatgtcgcatgcctgatgcaccgggtaggtgagcagcaggccggtcagtgcgtggccggaggcctccatctcggacttcacggtcgggttgcggtgcagttcggcttctgtgaccagcgacaggaacggtagcatgagttggttctcggatgggacggcggaatgcgtgaagatcatggtcttgttcgggtcgatgccggcggccatgtagtcgagcaccaggttgagcacgttgtcctcgatgtgctcggtggtgtcgcggtcggtgatcacttgatagtcggcgatgatgatgttggagttcactccgcggttctgcatggccacgcgttcgcgaatggatccgaagtagtggcccagatgcaggcggccggtcggtcggtcgccggtcagcatggtgaacttgcccggattctcctccagtttggccagcgtcgcgtcggaacgtttcttcgcggcgaggaagcttgcgctcatttcattgcctgcagcggtgatctgctgttcctgggtgtcgtccgtcatcatgtgtcctttttctacgaaaataaacgattttatcgtaaaagtctgagccgacaacgaaacggggctcaacaagtggtactctcgtgtttgatgaattgatagcacagtaatcctcagggggtcagatgggccgcggacgtcagaaagccaaacagcagaaaatagcccgaaagctcaagtacctgaccaccgacaccgattacgatgagcttgccaaggagcttggtgcacaggagcccggttcgggttcttttgaccccttcgccgacatcgaaaccaaatatgctcaacatgcggacggcgaacatgaatccgccgacgatgagcagcggtcttccgagcctgccgatgatctcgatgagtatgccaagtgggccgccgaagccgcggcgaaggccaccagcggtgagattccggtgaccaaggccgccgcacccaagccacacaagcccatcccgatgccggtgcccagtgcgctgaagccgaagaagcaggactgactgcatttgtacacacttgaaaagccgtggtcgaacaagatgattgttcgaccacggctttttcttatgtcctcccttatgatcctatgcaagcctatacgagcggcagcagatcgctcaggtcgtcgcgttcgccgacggcggtgatgcggccggcctccttttcctcggcccagctggtgattccggtggccagacgcatccacacgtccggttccagctcgatgacgtcgggaggtgtgagattgtgcggatccgaagccggtccatccaatattttgatggctccccacggcgccacccgtacttccacgccttcgccgggtgccttgttctccagcagatgcagcgagtagcgcactgccatcgcccatgtttgccgtggcagtttcggtgagagattcagcttgaagtcaaatgcccccatatcgtcggccggcatctgatcggtgatgatgcgccttgccgtttgcagccagtttgcaaacgcttcatgtcctttgttgagatcctgttctcgaataacagccatagacggtattttgccgctgataagcgactaagatgggtgtctgcggacaacgtggtcataattcaaaaggggcgtgttgaagggaaattacaagtgatactgaccatcgtttgtactgttttttgcagtgttttgcaaacgaatgccattatgtaatcacttgcaatttcatctttttatgattacgttgtatgctgaatttgagaacgtatgcatagtgttactaagtgttcatactgccgtatacgcaaggacgctggggcaaggcataatgttcagggagagtaatccgtcaaagggagtcaatcaatgaccgaaattaccgcaccaaagtcccccgttaccgcggccgaattcgcggacgagattcgcgagcagctgaagtacacgcagggcgtcacgccggagcaggccaagccggccgatgtgtatatcgcagcttcggcggcgatccgtcgccatctcgtggattcctggatgaagacccaggccgacatggtcaacggcaacaccaaggccgtcggctacctgtccgccgaattcctgatgggcaagcaactgcgcaacgcgctgctcaacgccggcctgaccgaacagttcaacgaagccgtcgaagctctcggcttctccgtgcaggatgtcgtcgacgccgaatacgagccgggcctcggcaacggcggtctgggtcgtctggccgcctgcttcatcgattcccttgcttccctgggcgtaccggcattcggttatggcatccagtacaagtacggcattttcaagcaggagttcgacgaggccggcaagcagatcgagactccggactactggctcgccaacgaggagccgtggggccatatcgattacaaccgtgaccagaaggtttccttcggcggcgaagtcgtcgaggagaacggcaagaaggtatggaagccggcctggtccgtgcgcgccgtgccggtcgactacatggttccgggctatgcctccggccgtgtgaacactctgcgcctgtggaccgccaagagctacgacgagttcgatttgctcaccttcaacaagtccgagtatcttgacgccgtcaagccgcaggtcgaagcggagaacatctccaagatcctgtatccggaagattccaccccgcagggcaaggcactgcgtctggagcagcagtatttcttcgtgtccgcctccatccatgacgccatccgcgtcttctatccgggccaggacaagccggatctgaccacgttcgcggacaagatcaccttccagctcaacgacacccacccggtcatcggcattccggagctcatgcgcgttctcatggacgagtacggctacgattgggacaccgcttggaccatcaccaacaagaccttcaactacacttgccacaccctgcttccggaagccctggaagtatggccgtccaagctcatcggcgaactgctgccgcgtcacctcgaaatcatcgagaagatcaacgcccagttcgaagccgagcttaaggccaagggcattgccgacgagaccatcaaggacatggccatctataccggtgactccgtgcgcatggcatatctcgccacctatggcggctcccatgtcaacggtgtggccgagctgcattcccagctcctgaaggacgtcaccctgaagaacttctccgacgcatacccggacaagttcaccaacgtaaccaatggcgtgaccccccgtcgtttcatcaagctggccaacccgcgtctgtccgacctcatcactgatggtctcggtaccgacaagtggctgagcgacctcgaattgctcaagggcctcgagccgttggccgccgatgacgaattcgtcaagaagttcgccgccgtcaagcaggccaacaaggtcgacttcgccaactatgccaagcgtgagtatggcttcgacatcgacccgaacaccatgatcaacaccatggtcaagcgtctgcacgagtacaagcgtcaggccctgaagatcctggctctgatcgcccgttacgccgacatcaagtccggcaagctgtccgccgacgacgtcatgccgcgcaccgtggtgttcggcgccaaggccgccccgggctactatctggccaagcagaccatccagctcatcaacaacgtggcccgtgtcgtcaacaacgatccggaggtcaagggcaagctcaacgtgtacttcccgtggaactacaacgtgcgcctggcacagcacctcatcccggccaccgatctcgatgagcagatctcccaggccggcaaggaagcctccggtaccggcaacatgaagttcgctcttaacggtgccatgacagtcggcacccttgatggcgcaaacgttgagatccgtgagcgcgtcggtgccgagaacttcttcctcttcggcatgaccgtcgatgaggtggacgccctctacgccgccggttacgacccgaagaagtactatgacgccaatccgcgcctcaaggctgccatcgacatggttgccgacggtaccttctccaacggcgacaagaccgttttcgaggatctcgttcacgattggctcaccaaggattggttcatgaccctcgccgatttcggtgcctacaccgacattcaggccgagatcgaagccctgtatgcccagccgctcgagtggaaccgtaaggctctcattaacgtggcgaactccggctacttcagctccgatcgttcgatcgaggattatttggaacgcatctggaagaccggtccgctcaagtgagtgatgcctgaatcaagatgacggaagggccgtcggaggacttgttctccggcggcccttgctatctagcgccatccagcgggtatatccatggatgaccgtacttgccaaagcgagcgtcttccggctgcgcgctggtcttgctacacaggctgtgaagcgttgactgtctatatttgggccccgtgaggcatatgcatacgttgcagagacgtaccgtgacgagaaaaaaacgatgtaccgttccccatcgtgtgcagacgtttgtccgattctccagaatcggacaaacggacggggccgggcataaaaaaggtccacatccaacatggatgcggacctgaacgagtcaatggtcggaaagcgatcaggcggcttccggatcagcggtttcggcctcggcttccggctcggcggtatccttggtcaggccaaggtcaaccggggaagagctgttctcccatggttcctcccacgggtcatagtccggattctgctgcttgtagatatacagaccgacgacagctgcaagcaaagctccgaagagcagtgcgaagaacttccaaccgttagaagacttgttctccatgacggctcctttcccatacacaggctgacctgttcgttcaagccaactctgccttccatcttaattcctggaatgtgacgattgggtggatttacgcgcggggaaatgcctgccgtgtcaaaagaaaaccgcgtagtgaagccattcgggggagtcgttggctccgcaggctccagtacagttaaggcatggcatatcaacgattcagcttgttccccgattcaccttcgttcaaggatttgttctcggcgcggtccctgcgctatcgctggcgtaatggtgaccctttgatcaccaccggcatcatggcggtgtgcattgtggtttggatcgtggaggcggtgctgaatctggtgtggcagggcggactcaatgccatgttgaacgccggcatgctcatgcctgccaccgccgttcacaagccgtggaccttcatcacctcgatgttcctgcatcagccgaactcgttgtggcacattctgttcaacatgctgacgctgtggtgcgtgggcccggtgctggaacgcatgatggggcattggtcgtttctcgcgctgtacgctgtttccggattggcgggcggtaccggcatgatgctctgggccgtgctgtcaggcgcttccggttggattacgcccgtatatggcgcttccggggcattgttcggcctcttcgccgccattttggtggtttaccgtcggattggtcttgatatcaggtcgatgatgatctggatgctgatcaatttcctgatgccggttatcatgccgaatatcgcttggcaggcccatttgggaggattcctattcggaggcatgttcacatggctgttggtttcggggttgcgtgttctgcgtggcaaaagcctgctgcggcgcacgctgatatacgggacggtcatggtgattgtgattattgcgattgatctgctgtgtaacgcagccaatccagtaaatatggcgttgttctgattgatggttccgattcatcaggaatggccttcgactcggtgagtcgggggccattttttgatgggtgacacaacgaacgggggaatgacgggaagttacatgtatgtagttttccacaattgtgaataagtgtgtggataagtagggcctaggttgaggataactcggggataagcactagatttatccacatagatattcacaaaatggcatttttcaaggattttcctatgtggataaggtggataactcactatccacacgtcagaacatggggaaatgcgacgtcgatatttcgtggtgtgaggaatcatcgaccacgaaatataggcactatccacattcatccacagatatccaccgttgttcacatcgcaatatggggttgtttgcctcaccatgcctgtataacggtgcgcgctacgcaaggaacgctgacaggccgccatttatgattacgggtatggaacatgaggcaatgatcagtccggagacgcgtgcgttcgtggtggtccaccgtaacgaggacgtacgcgagttggcgttgaaatccaaacatgtggacggattggacctgccgcaagcactcaatcagattgccggttggcagattgcccgcaacaaactgccggaatgggccgactgtgacgatatcatctatcctccgcatatttccatggaacaatgctcatcgcagtttacggcgcaatataaagccgaaatcgtcaatcgtctgctgtgtactgacgacggtgccgacaatgcccgagattcggcgcattccgacgatatcggcaaaacggacatcgccggcataacggaagcggaacacgcggaagaatgggattcggtgacaacgtcagcggggaacgccgatctatcgatggtagatctgacaggtggcttcggcgttgatttttcataccttgcgcgcggcttcacgcgtgccgcatatgtggagcggcagccgcacctgtgtgatctggccgcacacaacatgatcgttctgggattgcaccaaacggaaatcatatgcggtgatggtgtcgaatacctgcgttcgatgcaaccggtgtcgctgatctacattgatccggcacgtcgcgacgagcatggcacacgtacgtatgccatcgaggactgcatgccgaacgtgctcgccctgcgtgatctgctgctggccaaggcgcgattcgcgatgatcaaactgtctccgatgcttgactggcgtaaggccatcgccgatttcggcggtgccgtgagtgaagtgcatatcgtgtcgaccggcaacgaatgcaaggaactgctgatggtgctggatggcgccgtggaaacgaggcatccgacggatgacgtacgtgcgccacatgtgtattgcgtgaacgacggtcagcggattgattacgattccgcggtgtatgcgcgtggattgcgcatcggcacggcgccgttgccggagatggaatatctgtatgagccgaatgcatcgattatgaaagccggctgtttcgacctgctggaggaacggtatggtgtgacgcagatcggaccgaatagtcacctgtttgtggccgctgagcccgtgacggattttccagggcgcgggtttgccatcgaagcggttggaggcatgggcaagaaggatgtgaggaggttgctgagcggggtcgggagggcgaatgtcgcagtacgcaattttccgctcacagcgccgcagttgcgtaagaagctcaagcttgccgatggaggcgatacctacttgttcggcaccaccatccaaggcggtgggcatattctgctacgtaccgttaaggtgtgatcgcgtagtgggaggattcttccagtggctggaggttttatccctttgaggtgcgtttaggcgggatgatttctccagtcactggataaattgggacgctgaatggggttttagcggggtaattcttccagtggctggaggttttatccctttgaggtgcgtttaggcgggatgatttctccagtggctggaggttttgggacggctaagggtgaccggacatagcaaaagggcgtctggactcgcccagacgccctctcgtggcggatatgatcagcgccaccacatggtcataaggaatccgaccatgatgatggcaacggcgatggccagattccatgcgccgatgttcggaatcggataactaccgctcaggtagtaggtcacggcccagatcagaccgatgatcatcagtgcgcagaacagtggcacgaaccaacgcgggttggacttggtgcccttgatggtctcttcgacacggcgggtgttctcagcctgacgattcatcatgcgctgcatctgaggggtcagtgagtccttgtcgacggtggcgttcagcaccgcttcgacgcggtccatcgggatgtcaagatcgtcgtcatcttcggcggactcggcaacagcgtcgttgtcggtggtctcttccgtgctttccgcggcctcggactgccagtcctcctgggtgtccgcggtggtttcgtgcagctcttcgtcagccatcagcatagtctccttcaataggctaaaagtcataatagtgggtagactcgaaagcggcgaactcacatcgtaaaactgctcaaattcagagcaaacgttcagtactcgataggggaaggtccgcatggcgaaacgtaccggcagacataccgcgaaacggtcgaaggtggccggaatcgcggtgtttctggtattgatgctgtccggattcctgctggcgaccaatctgcgggtgaaccgttccgtggtggtctccaacgataccgccgacctggtggagcaacgggtgaaaagggtgaactcgttgcgcaaggaagtcgacggcctcagctccaaggtggatgacctgagcaaaacgctgaacagtgaaagcgacgatgactcacaggacggtgaggatgccggcgtcggcaccatgctgcctgccgtcgaaggtccagggctggtagtgacgctcgatgattcgccgctgtggaagaacatggtcgactcgtccggatcgacctccaatatcaacgactacgtgatacatcagcaggacgtcgaggccgtggtgaacgcgttgtgggccggcggcgcggaatccatgatgatcatggatcaacgcgtgctgttcagctccgccgtacgttgttccggcaacgtactgctgttgcagggcaagaaatattcgccgccgttcaagatctccgcgatcgggccggtcgacagtatgcagcaggcgctggatgattcaaaggagatcaccatctaccggcagtatgtaaacgcgttcggcctgggatggaaggtcgagaaaaaagacaagctgcatttcgacgcgaccgatgcgttgcagcaaccgttgaaatatgcgaaagtcatcgagaacgatgacagcagcggcgatgccgagcagaagacggaagagggaaatcagtaatgaagcacgtcaggccggtcgtggcacgccaaagaagcgtcatctggatattgctgggcgtactcgccgaaatcatgctgaccgcggcggctgtctgcgcgctgtatatcgcatggcagatgtggtggacgggtgtgcaatccgaacatacgcagatcgagacccgtcaggcggtgtcatggtcggatccgggcaaggccgagaacgtgaccatcgcccaggctcaggagggcgatccgccggtgcagccgcagaacgcgcaggaaggcgagctcatcgctcaggtctacattccacgattcggcagtcagtggcagcgcaatctcgtggaaggtacgacactcaccgaactcaacaagcacggtctcggacactacacgaattcgcagatgcccggccaaatcggtaatttcgccttcgccggccatcgcaacggctacgggcagccgctcggcgatgtagacaagctgcaggagggcgacccgattatcatccgcacgcaggattactggtacgtgtatcactacacgaagagtgaaatcgtactgccgaccgacgtggaagtcgtctcctccaaccctgaagagcctggcgccacgccgaccaaacgcatgctgaccatgaccacctgcgaaccgaaatactccaccccgacccaccgatggatcagctacggcgaattctcctactgggccaaggtttccgacggcattccacaggaactcgccaccaccgacaccaacggcaaggtcaaattcatcaacaacgggaaagcctcgttcgcctcgggcataaccacgttggagccgtggatcttcggcgcgctcgccgcttatgtggtcattttcgccgcggccgcggtggcatggcgctggcctgtgttggcggccatccgcgcaggggaacgtgagaaacccgatttcagcatatacggcggcttgctgcgattgcagccgggagtactgccgattcggttgctgttgctgctgctgttgctgttcgcggccgctgcctcgacgtttgaatggctgttcccatgggcggcttcgaacattccgatgttgcaggagatgtcgaactacacggctgtgtagtgagacacagggggcgatgcgacgactcgcgcacgtacactgctgttcaaccgttgataggagcattatgaccgattccgcacgcattctggtcgtagacaactacgattccttcgtctacacgattgtcggctatctcaagacgctcggcgcgaccgtgaccgtggtacgcaacgatgcgatcgatccggccacatccggcgtaatcgacgaatatgacggcgtgctgatctcccccggaccgggtactccggcggaatccggcgccagcgaaggcatgatccgtctatgcgcggtgcaaggcaagccgatgttcggcgtatgcctgggcatgcaggcgttggccgaagtgttcggcgcgaccgtaagccatgcgccgaccatcatgcacggcaaaaccagccaagtggagcatatcgatgatgcgatcttcgagggcgtggccaatccgatgacggcgacgcgttaccattcgctggccgtggaaccggattccgtgccggatgagcttgtggtgaccgcctggacgcagggcgatcatatcgtgcagggcatcaagcatcgtgacctgccgatgtatgcggtgcagtttcatccggaatcggtgatgacgcaggacgggtaccggttgctggcgaattggctgaaggtgtgcgggcaggattcggccgtggccaggtccatggggttgcagccgaaggttgtgggctgattcgtgccgaatccctgcgatatgcgggtctgacattcgtttgctgcgggtgctgcgaacatgtctcgattggtcgacacgctacgttgttcagaggaccaatgcaaaaggagcgacattgagtcgctccttttgcatattgggcgtgtggcctttagtgggcggtcggggatgcggtcgaggaggacgtgctgcttgacggcgacggcgacggcgagctggctgattcggtagtcagggtgatggtggcgccggaatcggcctgcgagccaccttcggggctcatgccggtaacgatggcgtcatcgtcggtcgaaccgttcacggtgacctggaaaccgttgttgataagcacgctcttggcactggatagcgtcatgtgcagcacgcttggcacactgacctgctgcttgccgagggacacccagatggttacggacgtgccgagttcgacggtgctgccggaacccggatcaagacgggtgaccgaaccggaatcgacggaatcggagtattcgttctccacattgaccgtgccgatgccggccttattgagctgctcaatcaccgaatccttcgactgtccgaccagattgtcgggaatcttggtcatgccggacgaaatatacaacgtgatgatcgtgcccttggtctgcttggaattcgcagccggatccgtgctcaccaccttgtctttttcgacggtgccgctatcgactgtcttgacgctgcccaccttgaagccggcggattccagaatggacttggcctcttcctggctcttattcgccacatcgggcactgacacggtctgcgggccggtggagaaccacacggatacggtggagcccttctccaccttggagccgcccttcggattctgcttcgtgacggtgcccttggtctgatcggactccgtgtcatcgcgggcgtcaagcttcagaccgagcgcattgagcttctcttcgaccgtagtctgcgagatattcgacatttcagtaaaatccggcacctcgacggtatcggtcgacgagtcgccatgattcagcatgtagacgatgcccaaaatggccagtagggccaccagtacgcccaccacggagccgatgatgatctgcttctttttcttcgacttggcggcggcagcgcgctgttccgcgcgggtcttcgtggcgacgccgccgttggggcccgccaacacctgttcgaattggccggtcaccggattgaatgcctgcgttgccgcgctctcaccactcgtcgggttcatcgccacggtcgcggcttcctgctcggcctgcttgcgggccttcacattggtcagatcggtcaacggattgaatgcggccgcgaccgggacgccgccgttcatgaacgtcagcagatcgttcttgaattcggatgcggtggcataccggttctggcggtccttcgccatggctttggcgcagatcgaatcccacatcttcggcagtcccggtaccaccgagcttggcggagtggccacttcggaaacatgctggtaggcgatggccaccgcggaatcaccggtgaacggcggcttaccggtcagcatctcatagagcacgcatccggcggaatacaggtcggagcgcatgtccacggtctcaccgcgggcctgctccggggagaggtactgtgcggtgccgaccacgccttgtgactgcgtcatcgtggcggcggaatcgtcgagtgcgcgggcgatgccgaaatccatgaccttcactacgccctgctcggagatcatgatgttgccgggcttgatatcgcggtggatcacacccatacggtgcgagtactccaatgcgttcagcacacccatcatcacctgttcggcgtcgcgctggctgagtgcaccgttcaccttgatgatgtcgcgcagggtctgacccttcacgtactccatcaccagatacggcagatgctcggtctgaccggtttcggtggtgacgacctcttcgcccgaatcgtagatgttcacgatgttcggattgttcatctgcgccacggaatgcgcctcgcggcggaagcgggcgaggaagatctggtcattggcgaaatcggcgcgcatgatcttcacggccacggtacgacccagacgcgtatcaagcgccacatgcacttcggccatgccaccgcggccgaccagttgaccgagctgatagcggccattcgccaaagaggtaggcatgttgttgctcatccctgttccttccaatcactgctgggcgagatatggggtttgctggccacacgacgaggaatccgacccccggtgggaacgatcatcgtgtccgccaactgtgtctgctgatcgagcagacgtcgttcaatgcgtgtcagcacgcgggataccgccagcgcgtccttcggacggtcgagcggatccttggcgagcatcgacatcacgaattcacgcagctgcacatccacggaatcaggcaacggcggaaccggattgttcacgtgtgcggcggcgatgtcaaccggcgtagtgccagtgaacggacgatgcccacacaggccttcataggcgacgacccccaacgaatagatgtcggactgcggcgtggcctgctggccttgcgcctgctccggggaaatatattgcgcggtgcccacgaccatgccatcttgcgtgatctgctcctggttagtggagtaggagacgccgaaatcggtgatcttcacctcgccggaatcggagaccatgatgttcgccggcttcacatcgcgatgaatcacgccatgcgaatgcgccacgaacaggccacgcgcggtttgaatgaggatcggcagcagctgcgtcggctccatcgggccgtcgatttcgtggaacagatcggccagcgacttgctcggcacatactccatgatcaggaatccgatgccgtcatgctcgtagtattcaaacaatgcggcgatgtttggatgcgccaaattggcggaattatgggcctctgcgcgtagacgaagtagtttcgcctcctggctggagcccagatcgccgcgtaaggccttgatggccaccgggcggccgagctgaatgtcatagcccttccacacttcgcccatgccgccttgcgccagacgggaatccagtctgtagcgtcggtggatgagctgtccttcaatcagtttcattctgccagcgcctcctgcatcatcgctttcatgatcggacctgcggccaatgcgccgtaggaatccacgttgtgcaccaccacggacaccgcgattttcggatcgtccgcgggtgcgaatccgatgacccaggcgtcgacggatccgttattctccccaatctgtgcggtaccggtcttcaccgccacctgcacgccgtcaatcgccaattcgggatcctccttggtgaccacggcctccatcatctgcgtgagcttgtcggcggtgtcggcactgaacggtcgcgacatcacctccgacttggtctgcgagacgaccgacagatccgaggagcgtacacggtcgaccagcgtcggttgcatcaacttgccgtcattggcgacggccgccgcaatcagggcgttctgcaacggggtgaccaccgtatctccctgtccgatcgatgccagcgcaagtttgtcgtcactcacatcagtcgggaatttcgaagccacggtcatccacggggtaccggaagaatcggtgccgtccacggtgatcgaactgtcgaaaccaagcttcttggccatcgacgagaccttatcgtcacccagcgagacgcccaattgcgcgaaggcggtgttcgacgaatacgccatcgcgtcttccagagaaatcttgccgtcggagccgttgccttgcgaagtggcgttcgtcagttgcaccgtggtgccgggaagcgtatagctggcaccggcgggaatctgcgtatcggtctggtattggccggtttccagcgcggcggccgcgaccaccgtcttgaacgtggagccgggcgggtacagctgcgaagtggcgcggttgagcatcggattcgcctggtcggacgagagcgtgttgtagttctcgttcacttccgacgtggtgtggctggccagctggttcggatcatagctcggcgtactcaccatggcgagaatacgaccggtcttcggttcgatggccacggccgcgccgtcaagcgaccccaaggcgttataggcagcctgctggattttcggatcgatggaggtctcgatggtggcgcccttgttctcctgaccggtaaacagcgctttgaaacgctgccagaacagctggtcggactgccccgacaacagtgaactacgggaggcttcgatcccgctccacccgcgctggctgatcgagaagaaaccggtgaccggtgcatacagcgggccatcggagtaggagcgctggtaggagaatgcgtcgttcgacgggtcggatttggcgattacggaaccgtccgaggcgagaatcgagcctcgcggagctccatactcatggtagagcgctcgggtgttgcgcggatcctgattgagctggttggcacggatggcggtgatgatggtcgtcgacatgcccaggatcacgaacaggatgatgacgatggtgaagagctgacgtaacgatttattcattcgagcctcccgtcacggtgcgtgcgatcggttcggtgggctgcgtacggtgtttcatgtcgcggttgcgcaacgcctgcatcgcctcgtactggaaggtatcgctgttcaggtcatcctccggtttgttcgcggcattcgaaatgatgaccagcaacgtggccaacagataattggcgatcagcgacgagccgccggcggccatgtacggcagggtcaggccggtgagcggaatgaccagcgtgatgccgccaaccacggtgaacacctggaatgccatggtgaacaccaggccggaggccagcagcttgccgaaaccgtccttgatcttcatggcggtgatcatgccggcggcgatgatcagcagatacagcatcagtgtggccaacaggccggtcagaccaagctcctcgccggcagcggcgtagatgtagtcggagttggcgatcggcgtgagcgacggatgcccctgccccaggccggtgcccatcatgccaccggaagccagaccgaaaatgccggtgaccaattggtacgatccgccatattccttgccatactgctccgtactgaacgggtgcagccaggcgtcgacgcgcgcgccgacatgactgaagatgttcgccgccaggaatgcgcccgcggcgaaggcgatgaagccgatgatgatccagcttttacggccggtggccacatacagcatggatacgaacatggcgaagaacatcagcgaggtgcccagatcgtgctgaatcacgagcacgcccatggccacgatccacaccacgatgatcgggcccatatccttgatcctcggtagctgcaggccgagtaccttcttgccgccgaccgcaagctggtcgcggtggtcgaacaggtaggaggcgaagaagaacgcaaggaacagcttggcgaattcgcttggctggaacgagccgaggccgggaatcttcacccaaatcctcgcgccatactgttcggagccgatcaccggcagcatcggggacagcagcaacaccaggccgaccaccatgcttacgtatgagaagcggcgcagcacgcggtaatccttgaggaagatcaccagcagggcactcaatacaagcgctatggccaaccacatcaactgtttgaatgcgaccgaggtcttggtctcctgatcgatgcgggcgatcatggttacgccgatgccggtcagcaacatgacgcagcataggatggtctggcttgcatacggctggaatcgcagcaacaggccccatgcggccaggaacagcactgcgatgaacacgagcattcccatgtagttggaagggaaaccacccgtggtgcgttcgaacatctggaagaacgccacggcgcaggtcagcatgctgagcatcagcagaccgaactgcctcaagcgggtagtgatcatgacttgtcaccgcctcgcggactcgagctggaggaagacgatgccgaggcgctcgagctgggactggccgaggagctggcggaaggcgatgatccgccgccgctcttcttgttttcggcctgttgctgcttgagctgcttcttgatgagcgtcgtgtgattcttcgcttcgccgtacgagtcgaaggagatgccctgcatcagctgttcctgccagcttggcggcaactcggaggtcttcataccggtgtcggagacggcgtgagacagcttcagtccgaagatgctcgtcgggacgccctggaagatggtcacgctgccgttgtcgtcgccgagataatacttggtctggctccaacgatacgtaccgacggcggctcccgccagtcccagcagcaccagaatggtgacgacgataccgatgatgcggttgcgtttggagtgcgcacgcttggtcttgcgctgttggatctgctcgttgcggatggccctggcgacttccggatcgttcggatcggcggagacgcggccgtcgttcttctgcacgacagggatttcgccggtgtccggattggtgcgatcgcccgtttcctcgcgtacggtcgacggctgcgccacacgctgctccggttgcggttcgttgtcggtctcgtcggggttcctgccatgacgaagggccgccgcacgtgcggcaggcgactgcttgccttcgcgtagcagcggtgccgtagccactggcgcgttgatgatgtcggcgatcggctcgaggctcgcgctggctgcgccggccaccaacggcgtctgatgcggcagatcgaaggcatcggcgttcagggcgagcgtcgcgtcggcgatcaccgcggtgacattgtcagtgctgcctgcccgcaacgccatggaaacgaggcgctgcgcacactcttcctgatcggagcaggtcgccagcatctcctgcagggtggaatcttccagtacgccgcacaggccgtcggaacacagcagccagcggtcggccggatgcgccttgcgtacggcgatgtcggggcgggggtcgatgtcgaagtcacccaatacgcgcatcacgacattgcgctgcggatggttgcgcgcctcggattcattgatgcgaccggtgtcgagcagatgctgcacatagctgtggtccgaagtcatgcggatgagatgaccgtcatgcagcagataggcgcgggagtcgccgatatgcgcgagtacccagtatcccgacaccaaggctacggcggtgacggtggtgcccatgcccgcaaggcggcgttcgcgcttggccttgccgacgatggcatcatgcgcggccatgacggaggtctccatcatgtgggcgacggtcttcacgtcaccttgctcattgtcctgctcgatatgcgccagcgatcggatggcgatggtggaggcggtatcgccgccggcatggccacccatgccgtcgcagatggcgatcaggtgctctccggcgaatgcggaatcctgattgttggaacgtacggtacccacatccgagaccgtggtggaatacaggaacaatggttgtgaagtggcggaagtcgtcaaagtcacctcaattcaaaggtggttgcgccgatacgtaccggaacgcgtgaaccgagaatcatcggagcgtccaagcgctgctggttgaccacagtgccgttggtggagcccagatcctcgatggcccactggccggttgcgggatcggtatagacgcgtgcatgatgcgaggagacgaattcgtcgtcgagcaccacggtgttcgacgcggcgcgacccaaggtgatggtgttgccggtcagagggacggaactgccggcaagcgggccatcgataacgaccagcagagtgggtttggcattcgaaatcggcatctcgttggtagggatgacgggcgcggccgacgccacgggtgccggcgcctcgaccgccttgcgcgcgcgacgctccttacggcgatgagcccgcgacttgcgcgggctgaacgtctcgatgtccttgtacaacgaacggaccgtacaggctacgaagatccataacagtatgaggaagccatacttgaggatcgcaaaggtaagttcggtgagcataaaggcaactcccgggttggggttggttactcctgatcctgcgaagaagcccagtacaggattcgggtacggccgatagtgatggtgttgccatccaacagcgtggccgccggtacctgatggccttcgacgtatgtgccattggtggagcccagatcgcgcgcgatcacattgccgtcattgatgtcaatctccagatgcttgcgggagatgccgggatcgtcgatcacgatgtcgcagttggaaccacggccgatgatggtcttgtccttggtgagcaggtactgcttttcaccgatctccagcatcgggcaatcctcggtctgtgcctcggtggtcaccggtaccgcgttgccctgtacggattcgctggtcagcttgaaatcgctcttgctcagatcgagatcttcctcgaagatcaccacgaccggtccgacgaatgcataatgctggctcttcgcatactgcgtgagattgtcggccagctcattggccagggtctccgcaccccattccacgatgttgttgaagtccggcgtgctcagtttgaaacggtattcgttcggggctacggtacggtcgcgagtaacgggcattgcctctttgtcaatctcgcgctcaagagcgctggagaggtcaaccggctgcaggtccttggacccgaacttagcgaatactccgttgacggcgccttccacgctcttctcaaatcggtcgagaacgctcatacttgtccctttctatcctcacctatcctacgcggtagagtgccgagagccaatttatgaggcccataattgcaaaaattccatgcaaagtggggtgtgaatggtgatgcggacctagttcggtgtcggttgtttgggtttctttccaaactaccgacggtgaggtggggctaggcgtcggtggtttgtgagaatacccaaactaccgatgatggtgcggcctgagcgtcggtggtttgtggtgccgcccagactgccgacggtgaggtgggcctgggtgtcggtagtttgggaagtatgaatgatgcgattgatgtgtttccccgactcaaggcccgcactgtgcgattcacatgcggcgcgccccgttccgcccgtgcgattggcgacgggtcgcgggcgctgttcctgcgatccgacggttcggaggataccgtcacctcgctatggatgagcgtgatcgacacgaccggcaccggcgatgatcgggaggtcctgcttgccgatccgcgcgaactgctggccgatgccgatgcggagaacgttcccgccgaagagcgtgcgcgacgcgagcgtgcgcgcgaaggcggctccggaatcgtaagctattccgtcgatcaggccggacggcgcgtcgtgttcaccatcaacggccagctgttcctgaccgaaatccgggaggacggcatctccgcacacacccgtcaactcgtcttggacgattcgatgctttccgccggcgaatacgggccggtgctcaatccgcgcatcagccccgacggccgccacgtgatgtacacgaccggcgagcacctgaacctgattgacatcgccgattggccggctccggggcaggccgcgcgggagtccatcaccacggtgtacggcgtatgcgacggcaacggagacgatcaggcgccccatacggtgaagatcggcctggcggaattcgtggccggcgaagagatggatcggtacgacggtttctggtggtcgccggattcccgatacgtgctgttcgagaccttcgatgcctcacccgagccgatatggcacatctgcgatcccgcgaatccgaccatgggcgcggccgcccgccgctacccgcaggcgctgacgtccaacgccgacgtgcatctgacactgctggagcttggcttcgacgctgatggctgctgttacggtgaggtgccgcacgcggtggagtgggatcggaaacgctacgaatatctggcatccgtgaattgggcggaagggcacgatccgatcatcgaggtacaggaccgactgcagcgcaacgatcaggtgctgaccgtccgcgtcggcgatccgatcatgccggtcatcgctccggaagccgaattcaccgacgagaacggcgatgaggtcgaaaccttctccttcgcgattcccgaatatgcgccaggcgaagagcccggtacgacccgcgtgctcgaagagcgtcacaacgactgctggcttgacttggtgcacggcacgcccgcctacacgccggatggtcgtctggtgtgtgcggtcaacgacatggaagccgatacgaaccgtctgagcgtggatggatgtgcgttcacgccaatcggtctgcaggtgcgcgaagtgcttgacgtgactgacgatgacgtgctgtgcgtggtgcagcgcacgccggaactgctgccggaatccgacctgccgtatctgtggcaggcgaacgcggccgatcatgatgcgcgcagcttcgacgtggtgtcgatacgcttcgatggcagctgggagccgctcacctacacgcccggccaatggacgatgtcgcgtgccggcaacggatgcgtgatgaccggacgcggcatggacgatgcgcgggtgcagatgcagcattgcatgaacgtcgtgacggtcggcgaagacggtgtggagacgctgtccatggtggtcgcgccgatcgagaaccatgccgccgaacccggcttcgtgccgaatgcgcgattcgtacgattgggggagcggtcgctatacacggcgatcgtgctgccgtccgagggcagcgggtacgcgcacgctgacaggctgccggtactcatgaagccatacggcggcccgggattccaacaagtcgtcgaaagccagtcgttctactgggatgcgcagtggtgggccgatcaggggtacatcgtcgtgatcgccgacggtcgcggcaccaccggccgcgggccgaaatgggatcgtgcgatctacgagagcatgaaagccgtgacgcttgaggatcaggttgacgcggtgcatgcgctgccgggaatcctcagcgagttgcgggcggaacaggccgactccgagactgccgtcaccattcccgaacccgacttggaacgggtggcgataatcggctggtcatatggcggattcctctccgcgctcgccgtgctggaggcgcctgatgtgttcgccgctgcctgcgcgggcgctccgccgactgactggacgctttacgacacgcactacaccgaacggtacctgggtctcgacccggtcgtgtacgagcgcaatggcatcatcgcggacgcgccgaatctcaaacgtccgctcatgctcatccacggattcgccgatgacaacgtgaccatcgcgcacagcctgcgactcagccaggcgctgatggccgccggtcggaagcatacgttcctgccgctcaccggcatcacgcatatgaccaacgacgaaaccgtcgccgaaaacctgctgattctccaacgcgacttcctcgcagacgccttacgcaaggtgtgatgctgtccgtcgattgcgatgcggatgatgcggggcgctcccgagtgtacgggggtaaggccgatgtcgcaggccggcatgagtattcgccaagcgcgttatccgcaccgtagctggtcaaggcaggactatagtgctcacaggccggtatgcgcagtatgcgacctgatagttgaatgttcgacttgacggaggaagatatgcgaacgattctcgccattttcgcgcgcgatgtcagacgcatcgtgaagagtcccgtggcgttggtcgtgacctgcggcgtagccctgattccgtcgctgtacgcatggtgcaacatcctcgccaactgggacccttacgccaacaccggcaacatccaagtggccgtggccaacgaggatctcggtaccgattccacgctcgtcggacacctcgacgcgggcgcgcagaccgttcgcaaactcaagaccaatcatcagctcggctggcgtttcgtcagcaagtcggacgccctcaacggcgtgaaatccggcgaatactatgcggcaatcgtattgccggatgacttcagcgcaacgctgatcggatccgtcaccggtaccaccaaacgtccgcacatcacgtactacgtcaacgaaaaggaaaacgcgatcgcgccgaaaatcaccgacaccggcgccacggaaatcgacgaacagatcaactccaccttcgtaaccgccgtcgccgacgccgtggccacggaagtcaagcgatccgcgcaggccaccacgcaatcgctcgacggtgcgcaaagcgacgtcatcgcggatctcaacaccaccatcgaccagctgaacagcgtgcgcgacgagctgacgcacatgtcgacctcactcagcgacgccgaaaccaccatcgccaaagcgcaggataccaacaagcagatcagtgcagaccttgccaccgccacgggtaccgccaacaccaccatcggactgctcgccgacgcacagaccgcatcacaacgattctcgacgacactcgccaaggcgctcgataacggcagtgtgcaattgtccagtctgcacatcggcgtcaacaccgctacaggtcagatcgtcagcgggctcaacaccacgcaaagcgccgtgaacgccgtcagccaggcgatgcagaagacctgcgacaaaaccgatgaattcatcggtggtctcgaccgcgtgctcgcctccagcggccttgatcacaacagcaaggaataccaagcgctcgcgcagcagatcgccgatgcgcgcacccagctcaaacaggagcagcagctgctcgacaccttcggcaacaacgccgacgccctgatcggtgacggcacgaccactgcgaccacgctcggcaacaccgtcgccggactcaccgccgacggggcaaacaaactgattgacgcacgtgacaaactgaccggcaccatcatgccgtcgctcgacagctcattcacctcgctcagcgccaccagcggttccctgatcggtacgctcgacgcgctcggcagcctgatcgggcaaagcgacggtctgctgaatcagcttgacgacaccctacggcagacacgcaccacactcgactccaccatcggggcgctgggcaaccttgaaggcaacctcgacgccacgcgcaccgacgtggccgcactctccagctcacagacctacgagcaaatcaccaaactgctaggcctcaacgcggcgagcatcggcgacttcatgggcaaccccgtgcatctgagcgaaatcgtcgtatatccgaccgacaactacgggtccgccgtcacgccgttctacaccaaccttgcgctgtgggtcggcggtttcgtgctcgtggccatctacaaactcgaagtggaccgcgacgagcgcatccgcaactacacgccgacgcaaggctatctcgggcgttggctgctgttcatgacagtcggcttcatgcaggcgatcatcgccaccgtaggcgatatcgcactcggcatccaatgtgcgcatccgatgctgttcatcctcgcaggactgctcgaatcgttcatatacgtgaacatcatctacgcgctcgccgctacgttccggcacatcggcaaggcggtggccgtggttctcgtgatcgtgcagattccgggtgcctccggcctatatccgattgagatgatgccggaattcttccaacggctcaagccgttcctgccattcacctacggcattcaggccatgcgcggaccgattgcgggactgtacaaaatgcactactggaacgatatgttccacttgctgtggtacttgccggttgccctgttcatcggattggtggtgcgccggctcgccatgaacctcaacgccctgttcgacgaacggctggccgacaccgacctgatgatcaccgaacgcaacgccggcgtagacagtcagttgcgcttcgtaggcatggcacgcgaattcgccgaacgctatccggaaatcgcgcacgcccgagccgaacggttcctcgccgtatacccgaagctggtacggtggggcttcctcacgttggcggtgctgccgttcgtactgctgattctgctgttcatcatccaacagaaaaccgtgatgcttacgttgtggatcgtgtcgatcatcgtcatcgacacctatctgatcgtggtcgaatacctgaaggaaaggtacgcgcggtgaaatatctctggggtatcttccgacgtgacatgcgccatgccacaagcaatgtgatcgccctgatcgtctcgatgggactggtgatcgtaccggcgttgtacgcatggttcaacatcgccgccagctgggatccatacggtaacacgaaggcgctgaaggtggcggtcgcaaacgtggactccggctacaagtcggagttgattccggtgcgcatcaacgtgggcgagacggtgctgagcgcactgcgagccaaccaccagctcgactggcagttcgtggacagcgccaaggccgtcgacggcgtgaaatccggcaagtactatgcggcgatcgtcattccgaaatccttcagcgccgacatgatgacgctgttctcacccaccgtcaagcatgcgacgctgaaatactatctcaacgaaaaaatcaatccgatcgcaccgcatatcaccgacgaaggtgcgtccaccgtggccaacaccatcgacaagaccttcgcgaaaacgatggcgcaggtcggactcgaccttgccgcaaacatgctgcagtattcgcaaagcccacagatgacgcaatacatgacgaatctgacgtcgaacatcgacggcatggtatccaccatctcaggggcgcaagcgcaggtgaacgcctactcgacgctgttgggttcggccgacagcgcgatcacctccacggacaagctgctcgcctccacgcgcaaagccggcaaacaggcgcgcaaaaccttgaaacagagcggaaccagcacctcgacactcaccgatgcctgcaccaacgtaaccgatgccgtcaatcaggctttgcaacaggcggtttcggcgctggacgacatcgcagacaaagtcggcaccgccttcgaccagctcgacaaggatgcgacaggcgccgcgaaaacactgcaggacctatcatcgcaggtatcaagcagtgcgaacgtatacggcaattacatcgcgcagctggagaagatgcgttcggcagccgaaggattgccggacggagactcgaaacaggccttgctgaatgccatcgacaagcagatcgcggcattgcaggccgcacaacaggatacgcaggatctggctacggcgctcgccgccgcctcgaaacaggttgccgccgacagcggcggcattcagcgggatcgacagcagatcctcaaccggatcacgacggcaaaacggtcgatcaccactgtgcaaagcgactatgagcagaacgtcaaacccaaactggacgatttgtcggcatcggtgcaaacgctcgtcacgcagaccggtaccgtgatcagcggactggatgccgtcaccggtgacgtcggatcaatggccggtggcatcggtgcgaatgtggctgccgtacgcaagacgctaggcagcgtatcggcctcgttgggcgaatcggccggcaagctgtccgatctgagcgcaaagttcaaacaggccgtacaggccggagatagtagcgcaatcgcatcgcttacgtcgagcgataccgacgccgtcgcgacgctgctgtccgcaccggtggcgctcgaccgtgtaccgatctacccgatcgccaattacggatcggccatggcgccgttctacacggtgctgtccatctgggtgggtgccatcattctggtggccatcatgaaggtgtccgtatccgatcgtgaaaaggcgcacgtgctcgggttgggggattcgttgccgcttcgcgcccgtaaccgtgaaattccgggtaacgcggcgacgttcgggttgcgattgcatcacgaatatttcggccgactgggcatcttcgcactgctggcgctgctgcaaggcaccatcgtatgcttgggcgacatgtactttctcggcgtgcaggccgagcatccgctgcagttcctggccgtgggatggttgtgcgcggtggttttctcgaacatcgtgtacacgttgaccgtgtcgttcggcgatatcggcaaggcattggctgtggtgctgctggtgatgcaggcagccggttcaggcggcacgttcccaatccagacgctgccgaagttcttccagatctgctacccgttcctgccgttcccgcacgccatcgacgcgatgcatgcggccatggccggctcatatggtcttgagtattggattgatcttggtgtgctcgcgctgttcctgctgccgtcgttgctgcttggactggtattgcgtcggccggtgatccgcctcaacaactgggtgctgcggaggcttgaatccacgcatgtgatgtagacggttccgtttgcgcttggcgatggcgtgtctgtaagagcatgcccgcgatggtatgaacgactggccgtatgatgggtgatatgactatcacgctcatcgatgaggcgcattacgacgccgaaatggacgctaaggtgcttccggcgctgcaagcctgcctgacggaagggcgtatgaagccggcgacgcacgacagcgacggcaaggcgttgcctacgctcgataatcccggcacgttgcactattgctgctacgacgtccgaaaattcaacgaatcgcgcggaggcaggttggcgggaccgttccgcggagcggtcgtcatctcccatggtttcaccgaattcggacgcaaatacagcgagatggtgtggtacttcctgcttgcaggctattccgtatgcgtattcgagcatcgcggtcacggccattccgcgcatgacatgagcaatccgagtttggtctggatcgatgactggcgtcgatatgtagctgatttcgcaacattcgccagcaccgtcggacgcgggtatgcaatgggtcggccgctcgacctgtactgccattccatgggcggcggcattggcgcggccgtgctggaacgttatccgagtctattcgacaaggcggtgctatccgcaccgatgatcgcaccggcggtcggtatgccgacgtgggtcgcgcgcatcgtcgtcggcggtatttgcgcactgggattcggcaaaagccgagtgttcgggcatgccgacttttccgacaatctcaatctggacgattatcgcggtgcgtccgaagcgcgcatccgctggttccacaagcaacggctcgccgacgaatgctgttggaccaatgcggcgaccttcgagtgggcgaatcaggccatggcgctatcccgtgcggtgctcaaacccgacatgtgcggtgccattgagacgccgacgctgctcttccaggccgggcttgacgtgtgggtgctcaacggtccgcaggacgagttcatcgaacgtgtgcgcgaaggtggcggttccatagagaaggtgcgctacgaccagtcgttgcacgagatcttctccatgccgaacgacgtggtcggtccgtatctgaagcgaatcctcgatttccttggcgcgcacgacgtaggcttgtaggagtggcttgcggcgggcttgtgctttgcgggcgcgtggctttttgtggctgcagactccgttgcttgagagtggcttgagaccgacttgagaccgcagccacagaggcacagttgtagtgccaccgccgtagggctgcggccacaatcatggtgggacttaggcgttgaacacgtaccggtcgagtcgatcgaacgcttccttgacacgactcaacggtagtgcgagattcacgcgaatcgagtacggctgtttgaacatgacgccatcctgccagcacacgcccacgtcccagccgcgtttttcgagttcctgcaacgaaacgccgtgcgcctgacaccattcggagcagtcgagaaacagcatgtacgtgccctccggcttggcgcatgagactccgtcgaaatgattggcgatgaaatcgcacgcgtagtccacattgccggtcagaacctcgcgcagttcgtcaagccacgcatacccctccggctggtaggcgccgatcagcgcgtgcatcgacagcacgttcatctcgttatagtgcgatttcgagctcttcgcgccaatacggtcgcgcagatacttgttgtagatgatgtgatagctgccgatcagccccgccaggttgaacgtcttgcttggcgcgtaaaaggcggcggtacggttgcgcgcgtcctcactgaccgactgcgtcggaatgtgctggtgattgccgagcgtcagatcggaccagatctcatcggaaatgaccaggcagtcgttgcggcgatagacctccatcgcctgctcgatctcccaacgctcccacacgcggccgcacgggttatgcgggctgcagaacacggcgacatggatgttgttctccttgattttgcggtccatgtcgtcgaaatccatacgccatacgccgtccgcgtcgcgcgtgagcgggctatgcacgatgcggtatccgttgttctcgatactcatcgtgaagccgatataggtcgggctgtgcagcaggaccgcatcgccgggcgcggcgaacgaggtgagcgcggaaatcacgccaccaagcacgccgttctcatagccgatggcctcgcgggtcagtcccgtcacgccgttgcgcgtggactgccagcggatgatcgcgtcgaaatactcgtcggttggactgaaatagccgtatgccgggtgtttggcgcgttcgatgatcgcttccgggacggtcggaacggtcgggaagttcatgtcggcaatccacatcggaatcacgtcgaacccttccttcggcggatccggcgagaagccgagctgtcccagcccgtcgaccgcaatcgaatcttcgccatgacggtccatgatggacgtgaaatcgtaagtcataccgtgcctttcgcaaacattgccggaggggagaccttcatcctaatacggtcacgtttcaccatcgagtccagcagacgacgcgatagaatcaggccggaacgtttcgaaaggtaaggggtggttatgggagtggataatgtctgaacgaactttcgaactgactcctcggaaactggccatcggtacaatcatgacggtgaccggggccgtattatggggcgtcaacggcaccgtatcgaaaatcctcatggactcatatcgcgtcgaccccacgtgggtggcatgcgtgcgcgaaatcgtggccggactgctattccttgcctgtgcgggggttgcgacgccgaaattgcttggcggcatgctgcgcgaacgcaaaaactatccgatgctggtcattgtggcgttgtcgagcgtgctggtgattcaggttggctatctgcaggcgattcactggaccaatgccggcaccgcaaccgtattgcaaagcctgagccttctattcgtgttgctgtacgtgtgcgtgcatggcagacggttgccgaccgtcatcgaaacgattggcgtgatacttgcggtaatcggcaccgtgctgattgccaccggcggcaatctgtcgtcgatttccctgccgctgcccggcctggcttgggggctggccaacgcactcggcaatgccgcgatggcgatcattccgcttgcgctgattgcacgatggggagccttttcggtgaatggcgtggcattcctgatttccggattcgtgctggtgccgttcgtgcggccatgggcccacatgccgcagttggatgcccgtggttggctgatgttgggttttctggtggtgatcggcacgttcgcggcgtgtggactgtatatgggcggcgttgcgattatcggctcgatgcgtggcattctcatcggcaccattgagccggtggtggctacggtcaccgccgtaacatggaccggtgcggcattctcgcccgccgacctggtcggtctggtgctgatcatcctcatggtgtttctggtgcggtaagctttcccggtcttctgactccgctcctccgtctggttcctctggttcgtcctcttgtctggttcgtccgatcttcccacccctctgtttgtccgattctggtgaatcagacaaacaagcagtactgtgcatcctctgtttgtccgaatctccagaatcggacaaacagagtggagcaaccgtgctccagttgtccgaaaatcccgaatcagccatgcgcgaggcagtcgcgtagtgccatgtgtccgattctggtgaatcggacattcgctgggtgcttaaggtgctccatgtgtccgaatctccagaatcggacacatggcatgggggatgggggagccgcttcggctcatgacctacttggtgtagacggagatacgctcaccgacatgcttgccggattcagcttcgtctaccatggcgatggcgtaatcggcatagctgatgaagcttttgccttcggcattggtggtgaattcctcgccggccagcccgtaggatccggtacgttcaccctcggcttggaagtcggcggcggggctgacgtaggtccacttcacgtcgtcgcggttgcgcaacagattgagggtggcgacatgtgctgcggagaccggtttgtaggcgtcagggaactccggagtgtcctcaagggccctggtgtgttctttgtttacaaacaggctgcctgcacctccaacaacgatcagtcggatgtcggtgccggaaagcaggtcggcgagatgaccggcggcctgtgcgatctgtggcagggtgtccggggaccaggtgccgaaggcatcgatgactacatcgaatccggcaagatccgccatggtcagattgaacacgtctttgatgatggcgttcagggctgtggttctgttctcacctcgtacgactgcggtcacatcatggccgcgacgcatggcctccttgacaatgagtcgtccggctttgccatttgctgcgactactgcgatcttcatggtgattcctttcgtgtttgcggcccttcaaaggaaaggtaactgccgaccggaaggtcaggcggagaaagattcctctctattgggtgttcccggtggaaatcttccgtttttcgcttacatgatgtactgtatttccatacagaaaataatggaagaaggcacaaattagttctgtagttacctatagggaacttttattgtgattactggattttatggaaaggataattttagatggaacgtgaattaccggcgtgtcccgttgaaacaacgttgctgatgatttccgataagtggaaggtgctgattttgcgtgatttgctcgatggcaccaagcgattcagtgaattacgtcgctcggtcggcaatgtttcgcagaaggtgcttaccgcgaatctgcgacagatggaacgtgatgggctggtgcaccgcgaggtctatccggaggtgccgccgcgtgtggaatattcgctgaccgaaaccggggtgagtctcaagccggtcatcaaggctatgaaagattggggaattcactataaggccacatgcgaagcatgagtttgtccgtttctgccgaatcggacatttctggagcgaaaagtggatttgtttgtccgattcaccagattcggacaaacggttgagtgggatgctgcctatgcgaagtgatagatagccagttaggagggtatgtaacacaaccggcagcacttcaatgtcggcgaatgaaccccgtactcaaacatccgtttttgatcaatgaccctcaagcatgttcaacgacgcttattgttgttatatttttcggtatattttcggggtttgatcagaaagcgaagaaccctgaaacattgcaattccaacgtttcagggttctaatcccgtggtgcgagcggggggagttgaacccccacgagcatacactcactgccacctgaagacagcgcgtctaccattccgccacgctcgcagacaatggactaatttacacccgtattggtatttgtccaatgccggcgtgtcgtgttgctgcctccatggggaaatgcataaggagtgaggaaactggcgttctgagtcaggctgatgcaggccggtgcggcatttggttgtccgattcaccagaatcggacaaccaagacggcaaagtacaatgcggcacagcgcatcggccgattccagaccgcaatcacccagcgcatttccgttcttccggtttgggcgttagcccctcgatccgttcgcgtagaagcgggccagcgtctcgtcgcggaattcgtcgaaatagccgccatcaatcgaagcgcggatgtcgtcaagcaacttgacgaagaaatgctcgttgtgaattgtagccagcgtgaatccgttgaattcgcgggcacgcagggcatgatccacgtaggcacgcgaatagtgcgtgcaggtatagcaggtgcagccctcctcaagcggcccgaaatcgtgtttgaactgcgcccgtttgatgttatagcggcccgaacgcgtgaaaatcgcgccattgcggccgcaacgtgccggcgccacgcaatcgaacgtgtcgccgccattctcaacgcatgcgaagatgtcatcgacggcggcgatgccgagcacatggcgcggtcggctttcgggcatcgcatcgcagatccaggcgcaggtgtcgccgataatacgcttttcgatcgcgccgccgataccgacgccatcgaaatcaagcgaggcgatctgctcggccgcatgacggcgcagatcctcataattcgcgccctgtaccacgccatacagcgcctgatatggcttgccgagacgctcctcggtaagccgctgatgctcggctacgcaccgctgcgcccaacgataggtacgctccacggaacgctcctggtagccacgcgtgttcatcaacgtggtcagttcgtcgaaggcgaacatgatgtcggcgccgattttgtgctggatgcccatggagatctcggcggagaagcggtgcagagagccgttgagcggtgacttgaacgtcacaccatcctcgtctacgaatgcgaggcgttccttgccttcggcgatcacttcatcggatttcatgccggttacgtccatggcgagggtcttcttgaagcccgcaccgagcgacagcacttggaacccgccggaatcggtgaaggtcggaccgttccagttcatgaatttcgcgagtccgccggcctcatcgagcacttgctcacctggccgctcgtagagatggaaggcgtttgacagcaggcactgcgcgccgagatccttcatggtctccggcaatacggccttcatcgcggcctgcgtggctaccggcacgaacgccggcgtatggatgtctccatgcggggtgtggatgatgccggtacgtccataacgcgcgccgccgcggcctttgccgtcggccgcatccggcagtcgagtgatttgctcaaaggagaatgcgcggcggtctccgggtttgcccggctcggctccgcgcggatgctcgacgagattcgattcagtaaggcttgtcatgcgtttcactttaggcgatagcgccgattgcgtcggatggagagagtgttcggtcctacgggatgggtgacgggccggatggattgcgcaagaggcgaaaaatcaccgtttgcaggtgtgatgaagacgttccgataaggatggaagcggctgttcgccgatgcagacgatcaattcgagtagtactttcaacaaacattcaggaaatttccagagcgggtatctttactcttagatagcagttcgagcggcacgattgctgaacatgtgaaatgccgcgagacgaataaggagcaagaatggctgaagataacaacgaccagaatgtcgtgcagccgcaaaacaacgcacaacaggccgtaccgacgcaaccggccgacgccgcgaccgacaatgccgagacctccgtgaccgaaccgattgcagtgcacgacgccggcgaacagccgaccactaccctgccttccgtgaatgccgcggattcggaaatcgccccggattatgcatccgccgccggcgaaagcaccgtggtttccggcggctcgtctacgggcggccagtcgactgccggcgcttccgcgcaatcgcagtatcgtccggcgccggaatacggcgcctacggaacggtgccgccgcagccgacgaacggaacgaatgccgcgcagccgcagtatggtcagcctgcacacagtgcgcagacatcgcagatgccgccgcggaacaatcgcaatcccttcttcggcaatccatatgtgaatccgcagaatgagcagcatgattcgcgcggcagcaatccgttcaccgctccgcagggaggtgcgaacgttccaccgaacaccccgaacaacggcaatccgttcaatccattcggcaatgcgggcaatccgcagaatccggcggtcaagacccgaccgaagaccgctggcaacgtggtcgtggccgtggtcgccgcgctggttgccgccgtgctctgcctcggcgtcggctatgcggccatcaccaatggttgggtgcatgtgcctacatcgagctcgatgaccagcatcagctccaaccagtccggttccggttcggccaaggccaagagcggtgaggccgttgattggacggcggtagccaaggaagtgtccaactccgtggtctccatccagaccgtgaccagcgagggcaccgccaagggttccggcgcgatcgtcagcgacaagggctacatcgttaccaataaccatgtgatttccggtgcacagcagattcaggtcacgctcgccaacggcaccatctattccgcgcaggtcgtcggcaccgataccaccaccgatttggcggtcatcaagcttgacaatccgccgagcgacctcaaagccgtggaattcgccgattccgacgaccttgccgtcggcgaggccgtgatggccatcggcaatccgctcggctatgacgacaccgccaccaccggtatcgtctccgcactcaaccgcccggtgaccgtgaccgatgacaacaacaacgccatcgtcaccaacgccgtgcagatcgacgccgcaatcaacccgggcaactccggcggcccgaccttcaacgcggccggtcaggtaatcggtatcaactcgtccatcgcctccaccgcaagctcttccagctcggcgggttccatcggcatcggtttcgcgattccgtcgaacctcgtcaagcgtgtggccaatgagatcatcgaaaacggttccgtgcagcacgtggcgctcggcatcaccatcaagagctccacggtcgaagccgacggtgtgacccgtggctgcgctcaggtgcagtccgtggtcgacggcggtccggcttccaaggccggcgtgaaggcgggcgactccatcgtggccttcaacggcaaggctgtgaacaacaactactcgctgctcggttacgtgcgtgcctccgccatgaacgacaaggtgacgctgaccatcgtgcgcgatggccacaccatggatctcgaagtgacgctgaatcaggaggaatccagcagcagctcctccaacaagcaggaacagaacgagcagaacaatggcggcaacggtcaagaccagcagggcaacggccagaacggtgacggcggcggattcaccgatccgttcggcctgtggtaaaccggatcagcaagtcggggcgtaagcccccgacaagcccaaggcgaacgtgataatcatcgaaaagccttgtagcgccaagcgaaacgggactgtgtgagcaatcgcacagtcccgtttcacatgccgtgcggccaagtccccctgaagacctgttacccttaaaacgaaggtcgttgaagcggccggataattgaacattccagtaatctttttacgccgtgtatcgaggcattccacgttcggacagtgccgccgatgggttaacaaggcgtgaatgcatcagccttggaccggtattccgacctgtacgtcctcggctggtatacgagcgtaaggagattcgatgcgtagagtcatcaatctttgcaagcaggttccactcctgccgatcaccatccttgccgccatcccgctggctatgctgggcacgtggcgaccatggggcacgcgttccgtattcgccatgctgtttggctgggattcggtcaatcccggtgtcgggcagtggctggtgattgcgctggtgctatacacgattatcgtcaccgtgcttggcatgatcgacgatgtgcggcatggtcacgtcggcgtcgatctgttggccgtcatcgccatcgcctcgacgctcgccgttcaggagtattgggccgcttgggccgtggtgctgatgatctcttccggtgaggcgattgaggaattcgcacagtcgaaagccgaaagcaacctgacggcgctgatcgaggccgcgccgaggactgcgcacgtagtaagactgccgggtatgcgtggacatgtgcatgcgtccgggaccgaacatgcctcggatatttcggaggacggcttccgtcgcgccgtcacaatgtccgattctgcagaatcggacatgcaggccgtacgatttacctcccagatgtccgattctgcagaatcggacacaggagcgccgaaggcttacgacgcttccggagagcatttcaccacgatttccgtggacgacgtcaagttgggcgacgtactgttggtactgccgggcgagacggttccggttgatggcgagctactgtcgggtgcggccacgctggacctgagcaacatcaacggcgagccgctaccgcgcgaaatctacgcaggggcacgcgtcatgtcgggagccgtcaacggctcgacaacgctgaccatgcgtgccacacagcttgctcacgattcgcagtatcagaagattctggagcttgtctcgtccgcgcaggactcacggccggccgtcgtgaaaaccgccgacgtgcttgcagtgccgtttaccgttctttcgcttgcgattgcggtgctcgcatggatcattgccggcacgccattgcgattcgcgcaggtgctggtgttggccacgccttgtccgttgctgattgcggctccggtcgcgtatgtcgccggaacggggcggctcgccaaggcgggaatccttatcaaagcgcaggacgtgcttgaaaacctgggccgtgtgacgcatatcttcttcgacaaaaccggcacgttgaccgttaaacagccgcaggtcgtgcgtgtcgagaagccgttcgacgtgaggtccccattcaatgacgatcacattctcatgatggctggtgtagtggaggggtactccgtgcatattttgtcgaagggcatcgcggcggccgggcagcgggccatgcatgatttgtatgcgcggtatgcggcagggcagcggctgtgcgcggaacggaatcttccggggcatgggcgcgactatccggtggtgaacaacattgtggaggatgccggcaaaggcgtgtccggcgaggtgaacgggcacaaggtgcgcgtggggcgttatgcctatgccacggccgacgagttcggcttttcgccagtggtccatgtgtccgattctggtgaatcggacaaacgtggcacctccactaccctccagatgtccgattctcccgaatcggacaatatgaagccaggaactagtgttcaagtgtccgattcaccagaatcggacatgcagagggtacggaatgcgggtgtactgtccgattcaccagaatcggacaaacgggcggtgaaaggcaggctggatgtgaactcgcggttcgcgccgctcgaaccggatgagatggccgcgtacgtggcgcttgacgggcaactggctgcacgcatcgtgttgcgtgatgtgccgcgcaagaacgcgaagaacgccttggcccgactgcgcgagcttggtgttgggaaactgtccatgctgaccggcgacaaggcggcttccgcgcgaatcatcgccgaggaggtcggcattgatgacgtccattccgaactgttccctgaagacaaagtgcgtgcggtcaaggatgcttccgaagctacgtgccggcatcggacgtggcgggatggcttcacgggcgaatcccgaattcatcaggtgaccatgatggttggcgacggtgtgaacgatgcgccggtgctcgcggctgccgacatcggcatggccatgaccgatggtacgtcgaccgcggcttccgaatccgctcaggtcgtgatcatgaacgacgacatcgcttccgtgccgcgtgccatcgccatcgcccgtcgtactaagaaggtgatgctgcaggcggtgctcgtgggtctcggtcttgccgtcatcggcatgattgccgccgcgttcaacctgattccggtggtggtcggcgcgtttatgcaggaaggcattgatgtggtgagcatactgtgggccctcactgctttgtgggatagggagtgagcgtgcggattcgccttggtggtagaggctgttcttgcgtctttcccaagatatttgggattggatgcgatgatgaaccgtgcacgattcccaggaatgtgatttcctgaaagtcgtgcacggattttccttggaaaaagtgccggtactcacctccaaagacatttagggggtatcggttgagtgataaaccgagcacgactctcgaaaagaccattttcctgaaagtcgtgcgcgattacgtgatgcggcctctatccttatatcccaacaaatccctatagtcccatggccctacagcgaactgggtgagatttcaccggcgatgggtcgcttcatccatttgccgaagtccgatccggtcacgccttgcgacagtaggaacatgattttcgcgtaggcggcctccagcgtcatgtcacccgatccgatggccccggcgcgagcaatcgcatcgcccgtctcgtaatggccgagcagcacttccgcctgctgacattgcgatgcgatgataaccggtacgccgtcatgcagcacgtcggcgatcacgtcggtcaggcctggctcgtcgctgggcacattacccacgccatatgcgcgtaacagtaccgcctccggccgcggtgtgagcatggcgtccagtcgtgccgcagaaatgcccggtaccatgtcgattacggccacatcatggcgctcgtacggtttcggtgaccgccagccacatccgaccgctgcggaatcgtccgcataccagtgccaaggcgtgccggtgcgtgccagcggtccggtggacggcgccgaaaatccttcgaacgcccagctcgatgacttgcttacacgattgccggcaaacagatgatgcccgaagaacagtcccacgccatggaatcgtccgctcatggccgcgttcagcgcaccggtcacattggcggtggcatccgactcgattttgccgagcggatgctgcgagcccgtgaagatcaccggcttgccgaattcagtcagcgcgtacgacagggccgcgctggaatagctcatcgtatcggtgccgtgcaacaccacgaacgcgtcggcgtcggcggcatgcgtgcgcaaatcgtcgatcatcgtctgccaattgtcgggtgtcgcattcgacgaatcaatcagcggatcaagttcggtgaacgaaaacaggccggagtccatatgcgcatcctcaagcagacggaacagccatccacgggtgtcggcgcccggaatcaggccattcggcgagtcgatcatcccgattgtgccaccggtataggtgatgtgaatgcgcattgccttcctccttatcgaaaaatcgatgcgccgggtgggcggcctgtatgttccgccgcccactttactgttttgtccgatatcgtgagcggctacttgcccggcgtttgcgtggtttccagcacgtcggccacgccgttgccgttgtcgtcgagcatctcgtccatcagatcgccgttgatgcgaccgcgtacgtagaaccagcccgccaccatggcgatgatgatcaccacgaacatggcgagcgtccaacggccggcagcgctggtgagattcgacagcacgaccaccgcgaagaacagcagggagatgtagttggtgtacggtgcgcccggcatgcgatattccggtcgcgtctcctcgccggttttcgccttcttgaggaatgcgagatgcgtcacaagaatgcacgcccaggtgccggcgatgccgatgccagccagattcatgacgatttcgaacgcgtcggatggcagtaccgcgttaagtgccacgccgaccagtcccagcgtggaggtgatgatgatgccgccatacggcacgtgatgcttgttcatgcgtgccgcgaatttcggtccggatccggccacggccagcgaacgcagggtgcgtccggtggaatacaggcctgcgttgagcgaggaaagcgccgcggtcaggactacgacctggatcacgtcgccggcatgcggaatgccaatgccggagaagaacatgacgaacggcgattcgttggaggagtaggcggtatacggcagcacgagtgccatgagcaccacggaacccacgtagaacacgaagatgcggatgatcatcgaattgatggccttcggcagcactttctcggcgttcttggcttcgccggcggccacaccgaccatttcggtgccgccgaacgcgaatacgacgcccaaagtcagggcgaataccggtgcgatgctcatcgggaacaggcctccgttatcggtgatgttggcgatgccggcgtgggcgtcgccaaccggggcgcccgtcacgatggcccagatggcgatgagcatgaacgcgacgatggtggccaccttgatggccgcgaaccagaattccgcctcaccgaacattttcacgctcagcatgttcagcacgaacaccaacgccagcgcgatcagtgccagtagccattgcggcacgccttggaacgccttccagtagtggaagtacacggctacggcggtgatgtcggccatgacggtcacggaccagtccaggaagaacagccatccggtcacgtacgcgcccttctcaccgaggaattcgcgtgcgtaggagacgaatgcgccggatgacgggcggcggattgccagctcgcctaacgcgcgcaccatcaggaacgcgaagatgccgcatacggcgtaggcgattgccagtcctgcgccgccctgcgacagtcggccgcccgcgcccagaaacagaccggtgccgatggatccgccgatggcgatcatctggatatgacgtggcttcaggtccttggcatagcctgcgtcgcttttgtcttgtttgactgcgctgtgcgatgttgcgtcgctcactgttgcttgctctttctctgtgttgtaggtcccatgcatgcgtgccgtatgagggcggtggtattcgtcaaacgtttttagtctgatggataggcacatgaattaacaggcacattataaggacggtgtgcaactgagcgagatccggttgcatccgtgccacgacagtggcgccgtgagccgttcgggccgtgtgatgcggctggcccctgcctgccatgcccatatcggatgtgcttaaattggtgcatcagagagaagctgcatggcggtgggagactgatatggggaatgagatgctggccggtgccgtgggggaggcaaggccgggcgagacgaaacggttcggaaccggaatgaggggttggattcgccgtcgttggcgtcccatcacgttcatcgcgtacgtcgtcgtgatcgtatgcgtgatggcgttccatgagccgtggttcgatgaggcgcagtcatggctcatcgcacgcgatgcgtcattccgcgatatcctgctgctgcgcccgcattacgaggggcatccgccgctatggtggctgatgctggcgattcccgcgaagctcggggtgccatatgagatcggtctgaaaggcgtacagttggtctgcgccgcggtcatggcatggttgctggtgttccgctcgcccttccccccgctggtcgcggtcctgctgccgttcacatattttccatgcttccaatatggcgtcacctcccgtccgtacgcgctgatgtgcgccgccatattcctggtggccgactgctggaagggacgcgaccggcatccgtggcgcttgacgttgagtctgctgctgctctgctgcaccagtagctacggcatcgttctggcatgcgcggtggcgttggtgtgggtcgcccgcgtgctactgcaggcgcggtccctccgcgccctaatcgccgattccggacgattcgtcgcctggctgacgctgatggccgtgggccttatgctggccgcgtgcatcctgccatatcccgacaccttcggcgtgacccccggcacgaacggcaattcacccattctgcagttcctgatgttctggctggtattgccgtccgaaagcatgttcacgtcgttcgccggcgatgtctcgctgcatggcatgaggatggacgtcctcccgattgcggtgtgcgtggtactgtcggcgttgatctgggccgcgctggtccgtcttgcgcgcagacgcggcgaccttgatattctgttgctgccgtatgcgctattcgcgctgtgcgcggcgaagtatttcagcctgcatcatctgggcatcatgtttgcgctgttcgtcgcggattggtggatgcttgtccgtgaccgtccgcttgatgtggacgatgcgccggaacgtctacgccgattcgtgaagacacggttcgagaaaaccgccgaaacccggcgctggagtccctctgtcgtgcgtgactgcgtgatcgtggcgttgctgttgccaagcctgttgtggaacgtcgccgccatcacttgtgacctgcgctacgactattcgggcgcacgggccatggcggcattcgtcaagcgcaacgggctcgagcatgaccgttgggtgtcgttctggcgctactatcccgaaaccacctggccggacggaagccatacgccgcgccaggacgatacgcaccgttacagctgggcggcaatcgccgccgacccgtacttcgaccacggcctactggactgtacctatcgcggccgttcctacgaaccgaaccaggtgccgacggcattgcggatgaatcgggaaatcgcggcctgtgccgccaatggcgaacctgaattcgtgatcggagacaccgattttccggattactatttcaagcgcctcggataccgtatgcgcgactatcgcaagatcacgatcgcgacgaagcgcacgccgtggaagaactggaccaccaccgccgacatcacggcgtatgtgcgcgtggatgtgttgcgcgatctgcgttcgtgacaccccgccattccggactacgtcaggaagggagagtttggcagagagccatccaagcatccattcccccggcaaatcgacccttttgcgtttcgacggtttgcgttaggctagagcgcgtgactgagactaatgaacttcgtattgctgttatcggcgccggccccgcaggcgtctactcctccgacatcttcctgcgccaactgggcaagctcggcgacgaactcggcttgggcaccaaggcccgcatcgacctgttcgaaaagctgcccgtaccgttcggcctggtgcgctacggcgtggcccccgatcatccttccatcaagttcatcgccagcgcgctcgagaagacgctcgacaaccccgacatccacctgtactgcgacgtggaattcggcaaggacgtgacgcttgacgaactgctcgaacgctacgacgccgtgctgttcgccaccggtgcagtggaagacaagccgctcggactgccgggagccgatcttgacggcgtgtacggtgccgccaagttcgtggaatggtatgacggctatccgaccggcgctcgcgaatggccgctcgaagccgaagaagtcgccgtaatcggcggtggcaacgtggccatggacgtggcgcgcgagctcatgcgcaacgccgacgatctgaaggaacgtaccgacattccggacaacgtgtacgaaggcatcaagggcaacaaggccaaggtactgcacctgttcatccgccgtggcgtggcccaggccaagttctccgtgcaggagctgcgtgagatggaaaagctgccgggcgtgcagctgatcatcaacgaggacgacttcgatctggatgacgacaccatcgaggaggccggcaaggacaagctcacccgccagatggtcgaagaactgttcaccatccgtgagatggccgaagacatggaagacgacggcgatacggacttcgaaggcaatccggccgaccgcaagtactatgtgcatttcaactccgcgccggtcgaagtgctgggcgaggatggcaaggtcgtcggcatccgtgtggagaagaccgagacttcagcggatggcaggatgagccgcaccggcgaattcgaggaatacccggtgcaggccgtgtaccatgcaatcggctacaagccggccaccgcgccgggcattgcctatgacgagcgccgtgcgcacctggccaatgcccatggtgatggccgtatcaccacggctgccgaagccggtgaggatgttgaggtgcgtgagcgcctgtatgccaccggttgggccaagcgcggtccggtgggcctgatcggctccaccaagtccgacgcgctgctgatcgtcaccaacatgctggaggatttgtccaaggccgccgagggcggacgcgtggccgccgatcgcgatccggaatccattgaccgcctgcttgcggaacgtggcgtcaagccgatcgacttcgctggctggaagaaggtcgatgccttcgagcgtgccgagggtgcgaaggaaggccgcgagcataagaaggtcatcgaacccgagcagatgcgcgctctggcccacgcctgattcccacagcccctcgagcagagagctcgaggggctgctcgtatgatgcttcgatgcgctgggagggcggcttcaccgcatgtttcggctcccagaaaaacccaaggtgtgcgtaaggtcacgataacttttcggtcatagcgttacgcacgacaggggaatcatacgaaaacggagtgtcatgggattcggcgatcgtagaaatcacgtgtggaaaacaggtcgaatgtacatgcgtaggcgcgtcaccgtggctatgaccggcatcgcggcggcagccgcactggctgtcgcctttggtacgggagcggctggtttgcagggccttggctcatccgcatccgagggaggtggaaagagcgcctcttccagcggacaagcctcctcaacatcacaaaccgatgcatccgacagtccgacgcagtccgcgatgaccggcatcgacgcacttgacggcagcgcaacgatctcaacttccggcttcacgctcgacactgactcgcaactggccatcgaatcgcagataaccaatttcgaatccgcgggatataccgcatccttcgtgctggtcgacatcaataccggccgtgcaatttcctacaatgcggatgcgcaggtctattcggcgtccgcaatcaaagcgccgttcatcatggcactcgcttcgacgggtaccatcgatctgaacgcggtataccaagcgggcgatacgcagaatgccacgacgaaacagaacatcgaccaggtgctgactgtctccgacaataccgcttacagttggctggtcgacacgtatggcaccgacgccttcgattcatgggcggcacaagccggcaccgccgtgcagatggccggctatggttacgtgaccacttgtgcgcgggacatggcgaagctgtggacgcagggttatggattcctgttcgcacagcagacgtcgggtgccgccgatgtttccgacgaggcgctgcagtggctgtcgggcgatatgacggattcactcaactccaatattcatcgggcgcttggcgactcaaccacggtgtatacgaaagccggatggatcagtggcgaaggcgacctgtatgcgttgaatgacggcggaatcgtggcgtcgtcatccggtgcgtacgtgctcagcgtgatgacggacgcatgcggacgcaacgacttgctcaccgagctggttgacgtattggattcggtgcattccggcgccatgctggcgtagggcgattcgcgatcgcacgctttgcgcgcacctgatatgttgcgccggtcggtggcgggggtgcggacccgataaggcgctcagcatgtatccagcaaaatatcagactgcatctttacgcttgggccctatgaacggcaaattgcgggtgcatggccattgcaatggcttgaagacaacgctgcttttcgcgttgatgtggggcgtcatcatgctgatttggtgggctacgggtggtagtcagcgcacgcttggcgtctacattctcatcggtcttggctcgactttcgtctcatactggttttccgacaagctggccatcgcgtcgatgggtgcgcgggccgtcagcgagcaggaggcgccgatgctgtacaaaatcgtgcgcgaactgtccgcaaaggcgggcaagccgatgccgcgcatctacattgcgccgaccatgagccccaacgccttcgcgaccggccgtaacgaacggcatgccgccgtctgctgtacgcagggcattctgcagatgctcaacgagcgtgagattcgcggcgtactcggccacgaactcatgcatgtgtacaatcacgatattctgacctccgcaatcgcatccgccatggccacggtgatttcgtatctcggctattcgctcatgtatttcggaggtggctcgtcgcgagacgatcgcaacggctcgtccagcaatggactcgggttgctcggcgtgctgctgagtgcgatccttgcgccgattgccgcctctttgattcagatggcgatttcgcgcacgcgcgaatacgatgccgatgaggacggttcgatgctgactggcgatcccgaagcgctcgcctccgcgttgaataagatttcgtatggtgccgaggccgcgccgatgcgcaagaccgcaggcacgcagtcggtggccgcgatgatgatcgccaatccgttctccacagagggcttctcccgcctgttttccacgcacccgccgaccgccgaccgcatttcgcgacttatgcagatgagccaggagatgaaggcgcagggcgtgcagtccggatatacgtccgatgggtatgtgcagggcgggtattcgcagagtggatacgtgcaaggcgggtattcgcaaggaccgttccgcagctgactggcggatttggacggcggatgctcgtgcgatgcgagtacggcgctcgtgtggcggagccactcaacggactcggctggcggatctggctggcgggcggttatgcgggcgcgtgcggcgcgggtcggtaatccgtatatcgggaaccgcgtctgtggagccgtgcgcgacgtgctaaacttaacctccgtgcccaaaaggcactttttgcggatgtagttcatcggtagaacgaaagcttcccaagctttaaaggcgggttcgactcccgtcatccgctccactcaaaacccttgaaattccagtcttttcagctgattttagacattctcacaaccctgcgaggtaactctgaggtaacaacttctggggaatgtcgttcttgcaatggactgaaatgactggctgttaccttccgttacctcgcgcgcagatcgggccatggtgtcggcagcagttcgtcgatggacacgtcgagtaccgtggccaaggcgatgagcgttttggccgtgggatttgctggacggtcttttgatgagccgccgccctcgagccgctggtattgcaatcgtgacattccggcgtcgtaggctacgcgctcctgactgtagccgcgttgcgcgcggatgcgccggaggttcatttcgaactcacgggtgtactgagtccaatccatgtctgcgttgatgcgttcagccatggtttcagccaacaactgtgctacatttatgtgactacatatatgtagctgtatgatttggggtagaatacgaggggtagtaaaggggagagagatgaccgaagaggaaaagaaagttcctgccgcgggtgaaaaaggcagcaggaagcgtactgtcgtgattgccgctgctatcgccgcgatcgtcgtccttggtggtgctggcggcggctacgcctacgctacgaacaaggcgtatgaagcgtatgagtctcaggtcaagtctgcgaaggctatcgattcaaagctcgtcaagaaggttgagtccgcccgacagcttgctaaggcgacgaaggatacggacgtgctcgacaagaccgtgctggattccctgaatgcgagcgtgaagacgggtgaggctcagaagggtagtccgaaggcggaggatgtgaacaggtgggcgctctgggacgtgagtaaggcgaagaccacggttgccgacgatatcaccgccgcaaccaaggccatcagttccattgacgccgccatgggcaaggtggacgcgtccaagaccgcgaagcaggtcaaggatgcgaaggacacgctcaacaaaaccatcaccgacgcggaaaccttatacaaggattccgaaggcaaagtgcaggacgataagacgcgtgaaagtctgaaaaccgccatcgacacggcaaagaaaaccgccgaaaacgcgaaggctgacgtgaaagccctgaacgcgcagaaagacacggtagcgaacgccgtcaaaagcgtaaacgactccaagactgcgaaagaacaagccgacgcggaagccaaagccaagaccgaagccgaggaagccgcacgccaagccgcacaacaggcaacacagtcccaaacccaaagctattcaaatatgagcagtcgtgcgaacagtggcaccagcacctatagcgccccgacgcaacaagcccagacccaacagtctgcgccacagcaaagccagaaccagcagaacaataattccaacaattctggatatattaagctctgtagctctggtgacaccagcggtaaagagtttgactacgttccttgcaactaaaagttaagaatactcacccggctggattctcaaatggtttccacgaccgtctctggcacgatggcgagcacttcatgctcgccatcgtccgcgtaagccgccaatatctctcccggctccaatactgtctataactaaatagacttattcgtccttttcagatatgtgcgtcagcgcggacagtgcgaatgatgttctcgggatggttggcgtaattggtcatccactcgctgggggagatgtagccgatgacttcgccgacgcctgttcgtttgctaacggtgtcggcatcgttggcctcgaggccatggctgttgtgcaggaatgccgaccatgcacgatcgagctgcgagtcttgcgtacgtggcttgttactgacgcgatacggtcgcattcctttcatgacggcttccagctcgtgaatgacccgccatagttgatttttcccgtacatggaccgttcggcgacgatttcgcctgtgatttgattgcttacgatgaagtgattgggtctgtcccatgtgacgatctcgcctttgcgtagcgggaaccattgcttgttggttgatgcgtccgtgcatagggcagtgagaagttcgaaatagctccagctgcgtttggtatgcccggttttccgggtttccatggtcatttctttggctacgttccaaggcgcggttttgttgagatattgcgacaaaagcacttgcgaggcatcgtcgaaatcgtccactggtctgatgtcgctttgccggatgtcggcctcaacgccctctttggcgagggctttctgccaacgatgatggaatcgtgcctgtaaattgaccaaatcggatgcggtgagcggcctatcgatcatgagcagcaggtgcaggtggaaatggtagccatgccgttggctccatgtcacctcgattcggctgatgattcccgcaatttggaagttgtatctgtcacctcttctccggtcgcggtactcgccgccggtggtcagggccgtgcgggcttttgaaatggcgtgggcgagtttttcggcgctatcggcgggattatgacccatggtcaaggtcatgaaggctatgcctcgattttggccttgttcattgttggaagacagccagtattggataccttgctccatttgttttgtgcggcggatggcgagaatctgcgagcagcgggggcattgtccggatttgcaacggtgcagacctccgaattggagtttgcggcttccgttctgttgcgggattgcccgcaatacggccattccaccgtatgcgatgttcccgctcacgaatttggaacatgatctgatggaagattgtgatgacatgcgccatgtgactcgctgtaattcccatagcagttccggaaatgccatgtacgggatgtgaaaatccgatttggtgaaagtcggtgtcggcgtcttttttcttgcggatggcatggggttcctttctttctgtcgccttggtgggttttgatgggttttgcgggatttatggttggttttctttgtcttgctggtgggtgaaaggcttcagaatgccggacatgatatggatttcatccgcttgcatcggtggaacctgaaagcggattgcctcgtgcttgaggtcgtcgtaataccatccgcgacctggcgttgaatgcgagatgagccatggcgcggcacctcgggagacggcttcgtctcctagcgccatcttcgcttcatccttggaattgagcgctagggctatgcgttccgggtagtgatcgcgggatttgaaaaactccttgcgggggtcctgcacggcggcgatgaccatgattcctgcactgcgcccggtcagcaacagggtatccagagcttcttgtgcctgagcttgtagcttcttctgttcggggctggtagctccatatagctggagcgcttcgtcgatgagcatgacgatgagcggggtctgcacggaccatctgatttccgtctcatgccttgatttgagccatgcgttgcgctgttttaccagctcgacggtttcatgaagcaggtttacggcttccggcagagtggaagcgatctttgtgtagaatccggcgtatgcgttggcacttacgccatccttgaggtcgatcgccagaagtcggacgctgccctcgcggaggaattcgtcgaaggccagaagaatattcgccagcaacgtggtcttaccgctgccggtggtgccggcaatgagcagatgtaggccgagcggaaggtggaaatcatcttcacttagttggttgggaatggcaagagccggtcggctggtcgtagctttccggctcttgtgtctgatggggaatggcatcatcgggcgaacttccagctccagatacgccggtgtagtgtcggtggctcggcgtcatccatctccagaacgtccatgagctgcccggccacgtcggtggcatcctcaaaattcctaattgtcggaactgtgcgcacgggcacacgaacggacatggctatggtgccgggcatccagaacgggaacggtccccacgtgatccggatgtcgttgatgtcggactcgctgacatggagaatggcagcgacggtcttaacggtatcgtgtgtttcatgggttatgacgccgataagggtcgcgaggacggctatgagtaggccaatggccgggagtaggatgcccggccattgcagaatccatggaagactcattttggctactctcccggttttgccggaatcgcgttgccgacgatgcgcatgccggaggcttggaaaacgacgctggagccgccttcgcgacgggtgcgcagcacggcggcgaaatcatcgtcgaaacgaacctgcgtaccgagcttgacgcgttccaactccggacattcaggaatctggacggtgaagcattcggtgctcacgcggccgaaacgctcgtaatcggtcaggacttcgacggtgtggagaatcttgccgtcctcggtgcgctgctccggcgcgagctggccgggggcgagtttggcacgctcctcgtcggtcaggtactggcgtacgatgtcggtatggccggtcagaatctgcggcttcgtcgacatgtcatggaaattgaatatgccgtttaccatggctgtgtcctttctgcatgttgctctcacaacaagagtgcggcataccggagtggtgaaaaatgggcggaaaaatgcaatgccggaactgcgatgcagtaccggcaacgaatgttgaaagcaggtgggatttatcgtttttgaaaacgccggttcagttcgtcgatgcgatagaggcggtgccggcctaaggtcatggtcgttaaaggtcttccgcatgtgggttgtgcgtgatcgtacagtccatgttcactgacacggtaggtgagggtggcttgggcctttggtatccagcaggtttccggcatggtcgagcattccatgaactcatcccaaaaacggtagggtatccacgcggccccaaacgtttcgccttgtgtgtggccagctgggatatcattcagctcggcatcggcccattcgagttcgtccgcgatctcgtacagcttgacgagttcgtcgattgcatcggttggcaggcctcgggatgccaagtagtggccacggtctgccgaggcgtttgctctgatgaaggcggcgtcgtgggatggaagccgttcggcgagggactgcacgcaaccgttgatgttggaataaatgcgtttctggaggcagtcgagacggctgtagcggcggacgctatcttgggaaacgccgagatagtgtgcgatgtaggagtatcgcagcgggtgaccatgagagcttcgcgtggtgccgccgtcactctcgatgaagtcggtggactcgtacgggtcgaggaacggattgaacgggtcccgtgattgcggattgcccgtgagtccgtcgcgcagcggaagcggagcgacggactcaaaactgggggtgtgccgtagaggtctgctcattggcgtccatccaatcgtccacgtcacccttgcgatacagcacggtgcgtgccgtcggcttcaggaatttcgggccttttccggtgtatcgcaattgtgcgagagcttgcttactgatattgcagtatgccgaggtctctgcgattgacatgtgaatctggcttgggtccggtgaggcgatgactttgcgcatgagattctcgtacagtgccgtggggtctcccaattgcttcatcctttcaaatcgtaactgtatgttctgatttcagatgataacggtcggcacaatgaatgcaaatcaaatcacaacggcgtgtttcgattcaaatgattataattctaactatgagttccattgatgataagatgattggcagaaacgtaaggaatctccgtggaaatatgaccatggagatgttggctgcgaaaatgcgtgacttgggtcacaaatggacgaagatcaccgttcacaacatcgaaacgggtgatcgccagttgcgtatgaaagaggccgtggaccttgccgaatgcgtcggggccgacgcggcttcggttgtaagcaatctcgtggtttcccagaacgccgttgcgatgaaccgcgcgcttacggaggccgtgcgggccagacgcactttcctgcaggggagccgcatactgctcaatgccaacgagaagttacgcaaggtcgggaccgaatgcgatgccatggatgagaacgagaagatcatcgggcaacggtgcgaagatgaattgcagcttgaaaaacaactggtcgaaatcgccgagaagctggacgaactggcgaaggccctccgtagcgatgaggaatcggacactctggcattcaacccattctgatttttgccattaacggttagacgaaaggagatctatggcatcgattcacaagaggacattgaaagacgggtccgtgagatactacgtgatgtggcgagacccggcgcacaaacagaggaaattcggcaactggcggcggaaaagcgaggcggccgcctacaaaatccaagtcgaacaaggcctgcacacgggaacctacgtggaccccaaagctggagagatcacggtggacgaactcgcctcgacatggctcacgggcaaggccggaaccgtgaaacgcaaatattacatggacttgcaaaccgcataccggctccatgtgcaaccggcatgggggctacggccgattaacggcatccgccattccgaagtccaaacgtgggtctcgcagatgagccaaggtgatacggccgccatgaataatgcaaaatcagcatccgagaaatgcaagttcaagcccaaaagcgcttccgtcgtacagcgcgcgttcggagtcctcaaaggcatcctcgaaatggcccgggacgacggcctgatcgtcagactccccacggagaagatcatgcttccccggaaggttcccaaaaaacgcacatacttaacggccgagcagctggtggccctttccaaagcgtccggccgccacggggtactggtcttgacgctcgggttttgcgggctgcgatggggagaggccgccgcactacgcgtagaagacgtttccgtcgacgaacgaagactgcggattcggcgcaattgggttcgcgcaggccgggaactgatcgaaacggagccaaagacatgggaacggcgtgatgtgccggttccggaatacgtaatggccgcaatccaaaaagagatgcaggggaaagggccggacgatctggtcttcacggatgccggtggaggtcgcatccatgagcaatccgcctccgtgcatccgaaggacgcggacgctcagcagtggtttggcaatgcgttgcgcgatgctggtgtaccggtcctgacgtgccatgatctaaggcacacggcggcaagcatcgcggtgcattcgggagccaacgtgaaggctctccagcggatgctcgggcataagagcgcggcgatgaccctcgaccgatacgccgatctcttcgacaaagatttggacaccgtttccgacgctgtcggacgggaaatcgccaaagctctgaggtaacactgaggtaacaccttcagaaaaacaacatgatcggagctttcttcgatgaccgtaaaaggctggaatttcaagctttctggtattgaaggcgcatagtgccaaaggggagtatagggttcgactcccgtcatccgctccacgatttctccaacttcaggattattccaacagcatagccagagaagccgattgaaggctaaggtgtatgtatggatatgcttgaagcgatgcgttcacggcacaccgtacgtgcctataccaacaagccgatacctgacgacatcgtatcgttgcttactaggcgcgttgcgcatgacaatcaaaaatatggcacagccatcactctacgaaccgaagacacaactgcgttcggccccatcttcaaactgatacgtgccaaaggtgtgcgtaatttcctcatcatgtccgcgaatctgcgtgagggggaggaccctcgagaactggacgaacgactgggatatgcgggcgccgatctcatgttgtacgcgcaaaccttgggcctcaatacctggtgggcgggcggtacctacagccgtaagattgtggacaaaatggcggaaggtaaccggaccatcgccgtcatcgccatcggatacggagcggagcaaggcgagccgcaccaatccaaatccgtttccgaagtctgcaaatacgacggtaaggcccctgcatggttcacggacggtgtgaaagcggcactgcttgcaccgacggcattcaacaaacaggactttttcatcgaaggacacgggcggatcgtgtccgttcgtctgaccaacgagacgtcatactccggagctgatctgggtctggtcaaataccatttctcactaggggcgggagccgataatttcggctgggcctgactggggctggagccgaccagagtgctgggcttaggtgggagcacttggcttagccgggcactcgggaccaagctggggccaacgaccgttgccttgggttctggtttgtccgattctggagaatcggacaaacggggtgtgtcaaaacgtacacggatggctgattcaccagaatcggacaaacgaaaggcgagcgtacgccgccgcaactaccggttgcagagagaaatccggttgcaccatggccgtgcaaccgcaagatggtggcacgcaaccgaagccttgtggcaatctgcaatcatcaatcgcaaacacgttccacactttcgagggcaagatcgccaatcgaacggtatgagacgatggaaccaatcgcagtaaaggagcaaagatgagcttcagggaaaatctgcaatacctgcgcggcacccgcaatatgacgcaggagcagctggcgatgctgctcggcgtctcacggcaggccatctcgaaatgggagtccgaaaaagcatatccggaaatggacaaattgctgatgatctgcgacctgttcggcgtaacgcttgatgacctggtgatgggtgacgttcgcagaccgaattcgggcatacgtgaatcgaccgccgatacgtctacgaattccggatcggtcggggtcgtggccgcaattgcgcaaccggtcggtttcgcggcggcttcgtcgtcgctgcgaaaccaggcggaatcgtcggcttcgacgcaagacgcgccgagtgcgctgcaagcggatcaccctgcagcggcgccgcgttccgccgcagcatcgcgctctgcaatgccgcaagacatggtcggctacgacagtcatatgaagatccacgcatggctgactgcgcttggcgtcgccgcgatgattcttggtgttgcggccggcatgctattcgactccgaaaactcgattatcggacacagtccgatgaatgaattcctgaccgccgcgccgattattctcggtgtgatcgtaggctgtgcgttgctgattcctgccggtgccctgcatggcgatttccaacggcgtcatccgtacattcaggatttctacacggatgatgacaggtcgcgcgcagtcatcgaaaatggcatcggtaaggctgtgggtgtggggttgatcatggtcggcgtatgcgtgatggtgtactgcaacgaggtactcggcatcaacaacgggtggcccgtcagcataatgctggcactggtggccatagccgtattctgcttcatcttcacggggatgcggctcgatcgcacaaagctcggcaagtacaatcgcgaaagcgaagagcgcaatgcggagggtgattccgcggaggatgatttcgaaagcccgtcacagcctatgagtgtgaccgacaaatactacaacaaacttaccggggcggtgtgcggtatcatcatgctgattgcaacggtgatggcgctgctcatgctgttcgtgggcgtcaatgcgaatgccgcgcttgggggcgatcctagtttttggggagctgttttctggattccttggccgattggcggcatcctgtgtggcgttgccggcacagtcatccagttgctgaagtatcgtaacggccgacggtagggcgctgggattgctggctgcgaatggagtgatgcggagccgtggggttgtgcagctgcgggttgtgcagcgcgtggcatgcgggcagttgtctgatgggtttgtttgtccgattctggtgaatcggacaaacaaacccatatcttttgcctttacctgactgattctggagaatcggacatttggatacctgtatattggggtctgaatggctgattcaccagaatcggacatctgttgggcgtgtgaagtaacgtggtgcgcgtgaaagcagatgagagaaagacgccacgcaatccgttgcttggacatgcgatttcgcatcgtggcacgattatcggcctgtgtgcaatcgtgttgtgggggttcatggccgggctggtgcgtcttgtcgccgacgcattcggtgcaacgctcggatctgcgctgatctacaccgtcggtggcatgatgctgatgatcgtacgtcgaccggcgccgattcgtaaggcaccacgtaaatatctgattattggcggtgccatgttcatcgcgtacgaagcgtcaatctcattgtcgatcggactcgcctcaacggccgcgcaatctgtggaagtgagcttggtcaactatctatggcccacactgctggtactgatgaccgctgcggtctcacataagcgcggtgcggtctggaaagcgctgccaggcgcgatcgtggcgacaatcggcgtggcgatggccgtcggaggtgagagtctcgacgtacatgaggccatgcgtaacatcgcatcgaatccgctgccgtatgcattggcgctcgcaggcgcgttcatatgggcagtgtatgcaaccgtgacacctgtgatgtccgacggctacgatggtacgacgattttcttctgctgcgtggccgtagtgctgtgggtgattcacttcgcgtccggccaaggctggccaacatccacgccgtcgataagcggatatgcggcactggcggcctgtgcactgtcgattgccggcggatacgcctgttggggctatggcatgttgcacggaaacatggagacgctggcggtcggctcatatgccacgcccgtgttctccaccgcatccagcacggtgctgctcggtgtggctttgggcgtgccattctggattggcgtggtgctggtggtggcggggtcgctgatcaatctgtggttcgcgcggcgtgctagttagccatctctccgcatgtccgattctcccgaatcagacagtctgattggttcgtgcgctgtatgaatgtccgattctggtgaatcagtcacatacattccgttttctgtaccccggttgtccgattctccagaatcagacgcatgtggtgcagtatggcagcattggatgactgattcaccagaatcggacaaactggggcgaactcctgttattcccgctgaagattgacgccccctcccccgcagcctcgcgacacgcccgaaaatgtggataactcccgtccttcgaccacaacccctgtttctgctggcacgtccacccgaaatcccctatcgtgtgcgcatgaacatgcacaggaattcttctgcaagagcgacgaaagctcagcagcgtctagacgcgatgctccgtcaagcctatgcgcaccgccgtcttgcggtacccgagcagcctaaggatcgccgtgcatgccaacgtcgtgtacataccggcatgattatcatgccgaagaagggctactacatcagtgcgcagcagtggaatgcactttcctacgccgatcgcatcaaatggacgcttcggacagtttgccacgaacatccggactgggtgctgtgtggtccgtccgccgccggtgcgtacggttactcgaccaccctgcaattgcagcggtacgtgcacatcgcagtgacggaacgttccaaggcggggcgtcacggcttcgtcatcgcacatttttacaaggatcctccgccgacgaaagtagtggacggcatgcaggtcaccgcagaaattcagactatggcggactgtgcgcggatgctggattttgaaaatgcgatgattgtgtgctgcacgggtttgcgcaagggcaatctcacgaagacgcaactgcaggagttcgttggcaataaaaggaagatcggcggaatcatccgtgcacgttatgttgcggagcatgcggaaccggcatgcgagaacggcggtgaggtggccgcgctcgccgcgatgctggaattgggattcgcgcagccacaggcgcaggttacttacgtaagtccgttggatggtcgcaatatcagggctgatttttcatgggaacgtgacgatggcagcattgtggtcggtgagttggatggtcggcagaagtatgtggacccgtccatgacggtcgacggtgacacggttgatgtgattttgcgagagaaggaccgtgaaagtgaactgaatatgctgaaaattaacgtcgtaagattccagatggagcatgtccgatcccgggaaccattgcggcgtcggcttgacgcggctcgagtgccacgtgacccatgtgcctatgcctcgccgttcgcgggattccgaagcaccgcctactagaagcgtggcagttcctgtcctgttcctctttctctttgttctttcctgattctgttcgcacacgagccgtgcccgcttggcttatagcgccactggatgaatccggtcctttggcatgcctgatccgggggaatttcaaccggttctggtggcgtgtggtcgtagcggggccttcctgtgtgtccgattctggtgaatcagccatccgcacacctttaatcatgttctgtttgtccgattctggtgaaacggacacagaacgctggttacctctccgccttggctgattcaccagaatcggacaaacagaggggaagacagccaaacgccacgtcgggaagactacctcagcgcccgccccgcggaacctagctgcttgcaagcctcgaccacacgtgcggccatcgaggattcggcctcacgaccccacgagcgtggatcgtagaacttcttgttgccgacttcaccatcaatcttcagcacggaatcgtaattgcggaacatgtgtcctgcgattgcacgtgagaacgcatactgcgtatccgtatcaatgttcatcttgaccacgccgtagctaaccgcttccgcaatctcagccgccgacgatccggaaccgccgtggaacaccagggggaacggcttgccttccggcatgtccggcagcgcacaagtggaaacgtgcgcggcatcaacgcttcccaggcgtccgtcatgcgcggccgcccatacttcggactgaatgtcgtgcagtaatcgtggacgcaactgcactacgcccggcttgtatgcgccatgcacgttgccgaaggtgaacgcggccatataacggccgtgttcacccaaccccagtcgttccgccacgcgcacgccatcggcgggcgtggagtacagcttgtcgttgatttccgcggaatggccgtcttcttcgccgccgaccgcgccaatctcaatttcgagcacggtgtgcgccttcacggacttttccagcagctcctcggcgatgtcaagattctcttccagcggaaccgtcgaaccgtcccacatgtgggactggaacgtcggctcttcgccgtgcttgacctgctccgcctcatgcgcaagcagcgggcggacccattcatccagatattgtttggcgcaatggtcggtgtgcagtgccaccgtaatgttcggatagtgtgcggccacttcatgcgcgaacgcggcgaatgcgagcgagccgaccacacgattgttgaccgattgtccggagaaatatgcggaaccgcccaccgacacctggatgatgccgtcggattccgcctcggcgaaaccctgcaacgcagcgttcagcgtctgcgtgctggtcacattgattgcgggatatgcgtagccgccacgacgtgcggcatccagcatctcggcataacgttcaggagttgcgatagtcatgtctccattatgtctcgttttgtgacactttggttttctcattgtggttttgcgggcctccggcggtcggatcgtttgccggcgcggcaacgtcgcctacaattgcggtaatcccaatacgacgtcacggcaatagcagcgaaagaagccagcatgactttggaagacgatattgaagagctgtcttttgaggatagcgtccgtccgccgcgcaaacatcacacttggttgcgcgtcatacttgcgatgttgctgaccgtactggtcgcaggaggcgcaacgggcggctggtatctgtggaactatcatctgcgccgcattccggttaccgtcaatcgtgtcgaccgtctcgttcgcatcgacagcacgattgcgaccctgctccatgacaacgatgatttcaacgccaagccaggccgtctgctggatatcaccggcaaggtcctcgacaagcgcggcggtggagcgatcatcgtgaaacgtaatggcgccgccgtggcaaccgcgcaacttggtagcacacgtatggccgacaacgacgtaatcaccgtggaatccggtaaggatcagaccgaagcgcatacggtacggtacgacaccgtcaaacacggtaccgacatcaatctcaacaatgggccgctgcaggaagtcaaacaactcggcaaggacggcatgaaagagatttgggtcgggcggagatccaagaaggaagtcgacaagggattcaagaaggaaccgcagaatctggtggtacagtcgcgttcgccacgaccggccggacgtaaggtaatcgcattgacgttcgacgacgggccaagccaatacagcgacgcgattctggacatactcaaggagaaaggcgtgaaggcgacgttcttcgacgtcggcgaaagctccgcgcaatacccgaagcaggagaagcgcatgcttgcagaaggtcatcaggtggcgagtcacagcaacacgcatccatacatgccgaagatggggcgtgacgagttgcgcgcggagatcacggcagggtttgacaatctgaagaaggcatccggactggaaacgaaggtgatgcgtgccccatatggtgcgttcggcgtggaacagtggaagcagtgcgccgacctgcttgacatgaacgtgctgtgggatatcgatacggaggattggaagatgcccggtgcgcaggccattcatgatgcggtgttgaacaatgcgcataacggcgcggtggtgctgatgcatgacggcggcggcgaccggtcgcaggacgtggaggcgttgccggggattatcgacgatctgaagaagcaggggtacgagttcgtgaccatcgagcagctgagtgagatgtagagcttggggtggatggcggcggacggggtcgtgtgttgcggcgctgccgggattccgtttgtccgattctggtgaatcagccaaatagcgtgcctcggcgtgcgcctgaatgtccgattctccagaatcggacagatgaggggtgaaaaggcgggcgtgcatggctgattcaccagaatcggacaaacaggattggcgacccgcagtagagggctcaaggtacgctgttttcggcggaataaggcgacagcgtggaggtgcgttatgccgggtatcgtgttgattggcgctcagtggggcgacgagggtaaaggcaaggccaccgatctcatcggtaccaaagtcgattacgttgcacgcttcaacggcggcaacaatgcaggccataccgtggtggtcggagacgaatcgtacgcactgcacctgctgccatccggcatcatcagtccgacggctaccccggtcatcggcaacggcgtcgtggtcgatcccgaagtactgttcgaggagatcgacggccttgaaagccgcggcgtggactgctcccgactgttggtgagcgaaagcgcacacatcatcgcgccgtatcatcgtgtactcgacaaggtgactgaacgcttcctcggcaagcataagatcggcaccaccggccgtggtatcggtccggcttacgctgacaagatcaatcgtgtcggcatccgcgtgcatgacctgttcaacgctgagcatctgcatgacaaggttgaggcgagcctgcatcagaagaatcagatgctggtcaaactgtacaatcgtcgtccgattgatgtggaccagaccaccgacgagctgcttaagctcggtgaacgtctgaagccttacgttgccaatacttccttggtgttgaacaaggcgcttgacgagggcaagaccgtattgttcgagggcggccaggccaccatgcttgacgtggaccatggcacctacccgttcgtgacatcctccaacccgaccgccggcggtgcctgcactggcaccggcgttggaccgaccaagatcacccgcgtgattggcgtctccaaagcatatgtgacccgagtcggtgagggaccgttcccgaccgaactgttcggtgaggatggcgactggctgcgtgcccagggccacgaatacggtgtgactactggtcgtccgcgtcgttgcggctggtttgacgcggtcgtgaatcgttacgcatcccaagtcaacggtctgaccgatatcgtgctcactaagcttgatgtgcttaccgggcttcaagaaattccgatttgtgtggcttacgacgtaaatggtgaacgccacgacgatatgccgaccgatcaggctgaatttgccgtcgcgaagcccatttacgagaccatgccgggctggaccgaagacatttcccaagtgcatgatttcaacgatctgccgcaaacctgccaggattacgtcaagcgtcttgaagagctgtccggatgccgcatttccgtgattggcaccggcccgcagcgcgatcacatcattcagatcaattcgctcgtcgactgattcccgctgcgcttcattggtagtgtacgtatgattggtgtcggcaggtgtacgcctgtccggcaccttttttatcccctatttgtctgattctggagattcggacaaacaactggtgatctgacatccttgtttgtccgtttctggtgaatcggacatgcgtgggcgagtttggatgcgtatgtgtctgattctggagattcggacacatgggggttgatattggaggcgcgactggctgattcaccagaatcggacagtctgtgtgaagacgtaacgggcaaggagacgggagcgcaatgcgatgagttcgattccgaccatcgacaggctgattccacgcttcgaccatctgaaatggaagatggccgcggccggcgttgctgttggtctgatttccggcttgttggtggtcgtttaccgtcttggtatcgaatatggcacggattgtgcacgttggatgtacgcgcagatccgtaaccagccgtggctgcttgtgccgtggatggctgcggccactggcagcgccctgcttatcgcttggatggttggcaaagagccgatggccggtggcagtggcattcctcaaaccaatggtgtggtgatcgatggtttgaagatgcgttggcagagcattttgccggttcgtttcgttggtggtctgctggggtcgctgttcggtctgtcgctgggccgtgaggggccgtccattcaaatcggcgcgtctggagcgcagtttctgtcgcatcgtttgcgtgggcggcgtcgtgaggatgcgcaggagcactatctggtgtccgccggtgccgctgccggcctttccgcagcgttcagcgccccgctttccggcatgatgtttgcgcttgaaggtattcatcgtagtttttcgcccactattttgatgggtgcgaccgctgcttcgctaaccgccgattttgtttcgaaatattgtttcggactgcgtcctgtattggatttcggcgctgtcgggcaactgcctcttgccgaatacatttggttgattccgctggggatcgtcgccggtctggtcggttcgctggtgaaccgttccttgcttggattgcagacgttatatggcaagctgcctgcgtggattcgcccgatggttgccatcgcgatcgcgttgccggtcggcatctggctgccggacgtgcttggcggcggatcgaatctcatcgcattgtccgaaaaggccgaatcgggcattggtatgttgtgcatattgtttgcggcgaagctgattttcaccagcaccagttttggttccggtacccccggtggcattttcatgccgattctggcaatcggctcattggctggtggcatctgcggcgaggctgcacgtcagttttgcggattgcagtcgcagtccgtggctgtgttcgcggtttgtgtgatgacgggtacgttggccgcttccgtaaagactccgattacttcgattttgctggctgtagagatgtcgggtacgttgacgcacatgctgccgattgcggcatcggccttcatcgcgcttcttgtctccgatttgctgcgtaccaggccgatttatggcgaactgttggcacggtatatgaaggcgcgaggcatggaatcaaccgttgtgagccaggtcggcagcggtgtgatggaacttccgctggagatgggtgccgaagcggagggcaagcgcgtacgtgacgtggcatggccgtcaggctgtctgattatcggattgcgtcgtggcgagcgtgagatcgtgccgcgcggtgatactacgctgcgtgccggtgattatttggtggtgctgttcagtggcgaggaggaacgcaaggtgcgtctcgccatgcgtcggctgtgcgatgtcggactgtgagcgccctacacggatgtccgattctggagattcggacatctgtgggcgttgcagagggcattacgtgtctgattcaccagaatcggacacgtggtcggattgcgtcgtggcagcgtgtacactcgtgcaatgtcgggaagacggtatctgcgactggcgcctcgttgtgtgaccagtcgcgagaacggtgtggttcatgagtgagcgtctgaaagttttggaataagggagcgacatggaatcgcagacacggggtccgttgcatggcggacaggcggatgacgagcccaagccgcccaggtggctaggcgcgggggaggacccgaatccggcgacgcaggcgatcagcgtggttgaggcggccaacgctgatgcccaacctcaaggtgcggctgcggcttccaatcctcctcagattcctctcgccccgttaaagcgtgtgcaggcacgattcaatcctctggccgacggactgatgtatctggtggtgttcgtcggcggttttgtcggcgtgggacttcgtcgcgtgcttgatgagatgatgccggcggctgagggacagccgttcgtaccgggcaccttcgtgtcgaatatgcttgcctgtttcctgttcgccatgctggttgaatacatggcggtcgcttcatggtggccccgccgcatgcgtcagatcgccagtcgcggcattggtctggggatgctcggagggctttccaccatgtccgggctcatgttggaaaccatggaaggaatgagcacacatcatgtgacgggtgcattgttgtatcttgcaatcagtttcgtcggcggcatgattgcgtccgtggcgggcctcgggattatgcagttgctgctggcgcgccgcactcgcagagccgtacgtgaagcattacgtttgtccgattctggtgaatcggacaaacagggggctgacagacactcacggttgtccgattcaccagaatcggacaacttgacgatgaggaaggggctggccgaaggatatacgcaggtgaaagtggccgatatggcgcattccgccgctcaagccgcgttggaggcggctgcggcggcgcaggcggctgcgaccacggctgcgcgggccgcacaatccgaatctgtggaatcgcaggaatccccagggttggcggagcttgccgacgcgacgcggcggaatagtcctgtaccgtccgtgaatccgccgagtttcgaacccaagccgatcactgcggagattccgctggtcgccgatccgaccacgggggaggtgcgctgatgatgtggctgctttgcttcttcggcggcatcggggccatggcccgttatgtgcttgatgtgtcgattcaacgtagctggaatcgttccttcccgttgtccacgctggtgatcaacggtattgcctcgttgtgtgcgggcattgcgatgatgtcatattatgcgcaatcggtggattctcagaccgtcatgctgttcctgaccggttttctgggcgggttttccacgttctcgacggccatcaatgaagtgctgtcgttgattcgcaagaagcgtttcgcgatggtgttggggtatggcgtggcgacggttgcggtgccgctcgtgtgcgtcgcattgggtttcggattggcttcgctcgcccgttgacaaacgtcaggcgcggcaaaatgtcagatgcgcgagaatgccgaaaaatcgggcaaaaacgttgttttgccggcaatcatgtcccattttccgacagcggttgaccattccggcaccatagccaatccgtctgagagagctctccgccgaccttcccgcgtaatttccgtgttacaactccggcgtgagagtaaccttccggaaatctgagtgcaactgagaacgccgtttcttctcctacgttgtggaaacaacaagagaggaaatcctatgacagccgtatctcacattgcacggcatcgtcgatcgggaatcgtaatactatgttcgatcttcgccgctctttcgatgctattcattctgccacccgactcagccatggcggccgacgccgtggatgtctgcaatccgacttccgacaacggttgcgtcaacggcattctgcaggatgccgacaagaaagcgattgcggatatcaccgtgaagctttccggtacggaagaagcggaaacaacaaccgatgccgacggtaagtgggcgttttcagtcaaggatgacggcgattacaccgtcaccatcgacgaatccgtggccgaagagcacggattgaagtcgagcagcgccacggtgaccatcaagaaagccagcttcgacaagcagcgcggcgtggtccgcttcgaccaagtcaacgactccgcatcctccgacagctcgtcctccgactcggccagatccggcgccgacagctccagctcctcaggcaccgcaacggtatcaaagaagaaggccggctccaacatcggcaagcgcatctggcaacagctgtactccggcatcatcttcggtctgatgcttggcctgatgtcagtcggcatgaacctcgtctacggcaccaccggcctgcagtcgttctcgcacggtgagcaggtgacgctcggcggtctcatggcatatgtcggcacgcagatgctgcacatgccggtcgtggcctccgccattttcgccatcgtcatcggcgcaatcacaggtctcatccaaaacgaaatcgtatggggcccgctgcgccgccgccatgtcggcaccatgcagcagatgatcgtcaccatcggcctgtcgatggcattgcaatacacgttccagttcttcttcggcggtgacatcaagggcatcgtcaaatcggtgccggacagcttccagctcggcccgatcacgaccgacatgccgacgttgctgtccgcgctaatcgccatctgcgtgatcatcggcgtcacattgttcctctacaagacccgtctcggcagggcaacgcgagccgtgtccgacaatgcggcgctcgcagcggcttccggcatcaacgtggaccaggtggtacgtgtcgtctggatcctgtcatgctccatggccacactatccggcgtgctgttgggcatctacctcaacggcatctcctggaacaccggagcgaccctgatcctgctgatgttcgcggccgtcacgctcggcggcctcggtaccgccaacggcgcactcatcggttcgctggtcatcggcatcgtggcggacatgagctcgctcgtcatccccaacgacatgcgttacgccagcgcgctggcaatcctcatcatcgttctgctggtgcgcccgcagggcatcttcggcaagcaacaaagggtgggctgattcatggacatcatgacaatcatctccaatgcggcgggcgagctgatcgccccgaccacggcggcatacgtactcgccgccatcggtttgaacattcacttcggtatgacgggcctgatgaacatgggtcaggcaggcttcatgctgctcggcgcgtacggcttcgcagtcacgcagtcgatgggctgcaacctgttcgcctccgtatgcgcggcgctcgctcttgctgtcatctacgcactgctgcttggcattccgacgttgaagctcggccctgactatctagccatggtcacgttggctgccgcggaaatcatccgtatcatcggcaggtcgacggccatgacgaatctcaccggcggttccgccggcatttccccgcaggatttcacggagaagttcgaggcgctttccccgctgcccgatggttcgaccacgttcctgctgtggacctacagcaacaacatcgcgaactcctggtggcttcgtatcgtggcctggattctggtggcaatcgcggcgttcctgtgctggcgttggttccactcgccgtgggggcgcatgctcaagggcatccgcgaggatgagaacgcgatccgttcgctcggcaagccggttacgaaatacaagatggaatcgttgattctcggcggtctgtttggcgcgatggccggcatcatcttcgtgctgccgcgttccgtgcagccggattcgctcggtcgtaccgtcaccttctatgtgtggacgattctgctgctgggtggcgcggccacgattcttggcccggtactgggctcctgcgtgctgtgggtgttgctcaccttcgtcaaggaggtcatgcgcaatacggttcccgaaaccctgatctcctccaaccagatcgaagcccttggctgggtgatcgtcggcgtcgcgctgatgtgcctggtgatcttcaggccacaaggcttgttgggcgaccgaaaggagttggctttccatgcctgatacaacgaatactcaacagcccgccgtgtcgtctttccctcagccgggcgtcccgttccatgatctgacgaaatgggccaccaaggcgccagaaggtgaaaccctgatttccaccgcttacaaggacaaagtcaccgaggatctcaggttcgtggagaacaagccgggtgtgcataagcccgatccgattctgatcgccgacaacgtgacccgcaaattcggcggcatgactgccgtggacgtgggccacttcgagatcgaacgccacggcatcactgcgttgatcggtccgaacggtgccggcaagaccacgttcttcaatctgatgaccggcttcgatacgccgaataccggcacttggcagttcgacggcaaggacatggcccacgtgcaacctgagaaggtggcacgtatgggcatggtccgcacattccagctgacgaaggtcatgagccgtctgaccgtgcttgacaacatgctgcttggtgcgcccgtgcagccaggtgagggcatgttccgtgcgctgtttcccggaatgtggaaacgtcaggagaaagagaacgttgaaaaggcggaagcgctattggaacgcttcctgctgatcaagaagaaaaacgattatgcgggcgcgctttccggaggccaacgcaaactgctggagatggcacgtgcgctgatgtcggatccgcagctggtgatgctcgacgaaccgatggccggcgtgaatccggcgttgaagcagtcgctgctcgaccacatcatggcattgcgtgaggaaggcacgacggtgctgttcgtggaacatgacatcaacatggtgcgtcatatcgccgattgggtcaccgtgatggcggaaggcaagatcgttgccgaaggtcagccgaagagcgtgatgagcgacccggctgtgatcgacgcctatctgggtgcgcatgccaatgtggacctgggtgacgattccgtgcttgaagatttgaaggaggcctgagatgagcgacatcgcaagcgtcaccgatccggcaggtttgtccgattctccagaatcggacattcatgaggggaattttggttcccagttgtccgattctggagaatcggacacgcagggtgggagcgcggacggtttgacccgtgcgcagattcacgtgggagaacccgagggcgagcccctgctggacgcggtcgacctgatcgccgggtacattcccggcgtgaacatcctcaacggtgcctcccttaccttgcatgagggtgaaatcgtcggcatcatcggtccgaatggcgccggcaagtccacattgctcaagtcgctgttcggtctggtgcatatccactccggaaagctgttgttgaagggcgaggacatcaccaacctgcgtgccgacaagcttgtctcccgcggcgtcggtttcgtgccgcagaccgaaaacgtgttccccagcctgaccatcgcggaaaacatgcatatgggcgcatttcaggcgccgaagctgttcaacgagcggttcgactacgtgtgctccatcttccccaagctcggccaacgcaagaaccagcttgccggccagctttccggcggcgaacgccagatggtggccatggcccgcgccctgatgatgaagccatccgtactgttgctggatgagccttccgcaggtttgtccccgatgttgcaggatgagaccttcatccgcgtgcgtcaggtcaataaggccggtgtctccgtggttatcgtcgaacagaacgcccgtcgttgcctgcagatctgtgatcgtggctacgttctcgaccagggccgtaacgcatattccggcaagggccgtgacctgatggaagatccgaaggtcgtttccctctatctcggcaatctggaagaggaggtggaagaggaagggagatgaggtgacggcagaactctgggaatcacggaacggagcgcatgccgcctttctcgccgctcgacgcctgacgtaccttcgtacgccttcggtcccgaatggcggtctgcgcacgcgttccgcggtttcctccatgagccggaaccttgagtccccgagcccgggctttcttccgtaagcgaggacctcgagtcctggccaaccgccggcgtaccgggaatcctacctccgccggcggttcagccatgcctgaaaaccgttggaaatccttgtgtttccaacagttttcgggcttcatctcgggttaactttatgcacacactttcggtttgcgggttttctatattccgaagtaaagattgcgaacggtcgagaacaatcaacacgatcgcaatcgtcaccaagggttcggcattcggccggatcaagagaggaaatggtgattcgcatgaagcatatcaacatgaagagcatgaagaagctgtcgatcacgacgaccgccgtgatcgccgccgcggtgatgtcgctcgccggctgcggctcgagttccagcggttccgacagtgccgccagttcgtcggattccagcgccaagaccaccaagttcgtgcttggcggactgtggccggaaaccggttccctggcctatctcgcacctcctgaactggccgccgagaaacttgcggtcaaggatatcaacgatgcgggcggcgtgcttggcaatgacgtcaccaccgtcgatgccgacacctccgatgcggaccatgccgatcagaacacgtccgccgcgcagtccgtgctcagcaagaatccgtcgttcgtcatcggcccggcttccagctccgtggtcaagaacacgtacaagtccatcacctcgcagaacgttccgatgctgtcgatgggcgccacttcggccagcttctccggcctgtccgactacttcttccgtaccgtcgcccccgataccgtgcagggtgccgtgatgggcaacctcatcgcccaggatggcgtgcagaagctcgccatcgcggtcttcaacgacgaatacggcaccggcctgcgcgacacggtcgtcaagaccgccggtgacgcgggcgtcgatatcgtttacggcgagaaggataccttcgatccgaccgaaacgaacttctcttcgattgccaccgccatcaaggcgtccaaccctgacgcgacgctcgtcatcgccttcgatcagaccaagccgctgctcaaggccctcgcctccgccggtgtggacatgagcaagctgtatttcgtcgacggcaacacctccgattattccagcgagcttgatgccggcctgctcaagggctcgaagggcaccatccctggcgtcaacccgtccgatgacttcatcaagcgtctcgaatccaccggcgtggatctgaagaacaccaccacctatgctgccgaaacttacgatggcatcattctcgcagccctcgccgcgcagaagggcggcagcgccgacggcaagaccatccaggccaatatggcggcggtctccggcgcggacggcggcgaaaagtgcgattcctacaaggcatgcctcgccctcctcaaggacggcaaggacatccagtaccaaggccagaccggtatcggaccgttcaacaagaacaatgatccgagctccgcgaacatcggcgtctacaccttcgacggcgacaacaagccggtcttcgaccacacccagtccggcgacgttccgaccgactgacagtaggttgtgacggcggccgacaaacgtaagatgcgcggtcgccgtcgggcctcaatcgcaagaatccgcataattccagatagcgcaatcgtggtatccgcaggaatttgcggattcttgctttcccgcggcaataatcacgacaataaacgacagtacagagacaagaggaagtgacgataatgaagaagagtaattccagaaagaccctgattacgattaccgcggcggcggccgcgctgacgatgatgctgtccggctgcggctcgtcttcgtccagctcgagcgactcatccgcctcatccacatccgattccggcacgttcatggcggcaggcctgttcccgctcaccggctccatggcgtacctcggcccggccaatatcgccaccatgaagcttgcgcagaaggacatcaacgatgccggcggcgtactcggcaaagacatcgaaatcacttcggccgacacttcggacgcggaccatgccgaccagaacacgtcgtcggcgcagtcggtgctcgccaagaacccgtccgtcgtggtcggcccgccgtccagctccgtggtcaagaacacctacaagcaggtcacgtccgcgaaggtgccgatgatctcttcgggtgccacgtccaccgccttctccggcctgaacgactacttcttccgcaccatcccgccggacaccgtgcagggtgccgtgctgggccagatcatcgcacaggacggtgtgaagaaccttgccatcgcggtcttcaacgatgaatacggcacgtccctgcgtgacgtggtcgtcaagaccgtggaggatgccggcgtgaaggtcgtctacggcgagaaggataccttcgatccgaccgaaaccaacttctcctcgatggtgaccagcatcaaggcctctaatgcggatgccacgctggtgatcgccttcgatcagaccgtgccgctcgtcaaggaacttgcgacccagggcatcgatacccacaagctgtacatgaccgacggcaataccgtcgaccactccgaggacttcgatgccggtctgctggaaggttccgtcggcaccatcccgggcgcccatccgaccgacgaattccagaagaacgtcaagtccttcaactccaaggtcaccgacttcacctacaccgccgaaacctatgacgccatcgtgctggcggcgctcgcggcccagaagggcggcgcgacggacggcgagaccgtgcagaagaaccttatggcggtctccggttccaccaagggcgaggaatgcgattcctacaaggcttgcctggcgctgctcaaggacggcaaggaaatccagtacaagggccagacctccatcggcgcattcaacgatgcgcatgatccaagctcggcttccatcggcgtctacaagtacgatgccgacaacaagccggtcttcgaccactctcaggaaggttccgtgcctacggcctgattgtggcgccgcacctgagccacaggtgcgaatcatgaccaaacgagacgcgcggtgcgaagcgggcgacaatcgtcgtcaggcttcgcaccgctttcgtatgccgcgacctcatgctctcgacgaccgtctcgaccgaacgtacaacgatgcacacaccggtcgctaaaccggttcgatactatgtacaatgagcatgatagcggctgcgcaaaggagtatgaacatggtcggcatgcgcgatgtggcgaagaaggccggagtctcattgagcaccgtctcgttggtggtgaacggcacgggatatgtgtccgacgatatgcgtgaccgggtgcagcgtgccatgaacgcgctgaattatgtgccgaacgaactggcgcgtaatctataccacaatcgcaccaatatggtcggcgtgatcgtgccgaccatccggcatcccttcttcgccacgttcacggccagcttgcagcatatgctcgccgggcaggggctgagcaccatgctgtgctccaccgccgatgccgagaacggcgaagccgaatatgtggaaatgctgcgccgacatatcatggacggcatcgtaatgagcgcccataccgcgcatacgcctgattattggacgtccattcatcgcccgatcgttgcgttcgaccgtgtgctgggggagggcatcccctcggtcggttccgatcatgaacagggcggccgtctgattgccgatctgctcattcgcaccggtgcgcgtcatgtggtgatgatcggaggtccgcgtgatcagttcttcgacctagccgcccgcggcgaggtcgaagacgtcttcgatttggagaagaccaccttcccgacggtgcgttattacctgacgctcgagcaggagttgatgaaggccggtattcgatatgagtatgtggaagccggcgaggtcatggatttcgacggctaccgtcgtgcggtgggggagacgctggatcgcgttggtccggatggcgtggatgcggtagtcagctccgatataggggcctccttctgcgtgcgcgaagcattgcgccggggtatcgccattccgcaggatttgcagatcgtcgcctacgatggcacgtatctgaccgatctcgccggcatgaagacgaccgcggtcgtgcaggatttcgttgcaatcacgcagaccgtagccgatcacatcacgcaggccatcgccgacgaggatgcggccgccgccaaggcgagtctaagaaaagatgacaacccgttcgagccgtccgtgctcattcccgtgaccttggcgttgggtgacaccacacgagcggtgtcagcggccgccgatcactcgtaatcgccggtcggaccgatccccagcgcgtcatcatgcgtgcgtccggaatgaatcgcatcgttgaccgcctgaatctgtgccgtgtctacgactagcgcacgcccgtcgatctcactgatcggaatcacccagccaccgtgcgtcatatacaggctgtcggcctcacgtagttcggcaatcggcagcttcctgtagaccgccttatggccctcctgcaacgcccatgcgaacatctcacgctgcgaagtgccgttgaggatgccgatgcgcgggtcgggcgtgacgaaatcaccgccgtatcgcgccacgatcgaagaattcgggcactccatcgtatagccgtcctccgtgtgcagaatcgcgtcgccgacgccccgacgcgcgcattcgcggtgcacggcgcagttgaacgcgtagctgagggtcttcgcaccattgagcagccagggcgcgcgggcggtgatgtccgacggatatccgcgcgtcatcgacgccatggtgatcggttcgagtgaatgcaatgtgcccttggcatcaagaaagatgaagatggtgggcgtgcggtcggccgacctgcccacgccggtatcggggtcgagaccgcgggagacgatgatgcgcagcatcgggccgggttccgggtcgtcatattggtcgatgaccagctccacggcgcgggtcatcgccggaatgttcggctcgggcatattcataagctttgcggattgcgcgagacgcctgagatgattctccaacgagaccgggaaacccctccatacggtggtcgcctcaaagatgccatcacctcgcaatacgctcagatcgaaggcgttgatgatgctgtccgtcggatcggcgaaccgcaccagatcctcatcgggcgcgacggacgtgcctgtgaacagcgccttgccgttgccgacgcccagaacgatcgaactcatgggaacctctcttcctgcgcgcgcaaccatcgcgtgaaccatacggcgcgaatcgtgcggatggcgcgaatcccaatcacatggacatgtcagtaacatgtcaattctgccaatccgatcatgcgaagccgactgcgtaatgccagtcgcgtggaaccgacgcaacgcatgaaatcgggacgacgacgcgacgccgccgtacagcacccaacctaatggaggtatgtttccgcgcgaagccgccaatttgcaaggctgaaacattggcgtcacgaaagtcaaaacaccgtaacgttgtgcgtccatcgtggtggtcaagagagtttcccgttgcctgtgggctatgccggtgttgtgccgttcggtacgccgtcggcacggatataggtgaggaaggtgcaaacatggctgatcttgatgcggcatccactcccgcggccgcgcgcgccgcgttccgtgcagggcaagtacgcccgacatgcggcgtcgctcaaggctatgcgcaggcgaatctgatgattctgccgaaagagcaggcctttgatttcctattgtttgcgcaacgcaatcccaagccctgccccttgctggaagtgatggaaccgggcgtcaccgagccggcaaccgcgccggaagccgacatccgcaccgatgtaccgatgtatcgcgtgtggaggcgtggtgagttggtggctgaagtgccggacatccgcgactattggcggtccgatctggtgacgttcgtaatcggctgcagcttcacgttcgagtttcctttgatggaggccggaatccctgtgcgacacatcacggccggacgcaatgtgcccatgtacgacacgtcgatcgaatgccggccggcaggcgcctttcgctccacgatggtggtgtcgatgcgcggcattcccgcacgtcaggtggccgacgcatgccggatttccggatactatccgtcggtgcacggggctcccgtatgcgtgggtgatcccgcagcaattggcatcgaagacatcgcacatcccgactatggcgacgtgccggttctggaaccgggcgacattccggtgttctgggcgtgcggcgtgactccgcaggcggcggtgatggcgtcgaaaccggaattcgcgatcacgcatgcgccgggccacatgttcatcaccgacaaacgcgacctggactacatggtgtgagcggcgggacaacggtaaggagcggcatgaacggcatcgatctgaacagcgacatgggcgagagcttcgggcgttggagacttggcgacgacgagtcgttgctctcggtggtttcgagtgcgaacgtggcctgcggattccatgcgggcgatccttcggtgatgctgcgcacgctggagaccgcggccgcgcgcggagtcacggtcggtgcgcacgtcgcctatcgtgatctggctggattcggacgacgctacgtcgatgcgactcccgccgagctgaaggcggacgtgatgtatcagatcgccgcgctggagggactcgcgcatgccgccggcaccgccgtacggtacgtgaagccacatggggcgctctacaaccggatcgtgcacgacgaggtacaggccgctgcggtggtggacgcgatccgttgcgttgacccaagcctgggtgtgcttacccagcccggagccgtggtcggacgattggcggcggatgcgggcctgcgcgtgttccatgaggcgtttgccgaccgggcctacaatccggacggtacgctggtctcgcgccggctgcctggagcggtgatcgccgatccggcagtggtggccgcgcgtgtgctgcgtatggccacacggcatgaagtcgaagcggttgacggctccgtggtgacgttgaacgctgattccgtatgcgtgcatggcgattcgccctccgctgtggccatggctcgggccgtgagagccaatctggaggctgaaggcatcgaggtgctcgcatttgcggcggatagggaagagacacgccgtgatttcgatggggtatctggccatggtgtgagcactcccgaagtatccggcgctgcgcgtggcggcatatcatcctcgattggccggcaatcatgagatttcggacctgcggcgacagtggcgtgctggtggaactcgccgatctcgacgagaccctgcgcgtattcgccgcgctacgttcctccaaggctgcgggcataccgggcagcaacgctctggacgccgtgacccagctgattcccgcagcccgcacgattctaatctcattcgacccgctgctcgcatcccgcgccgacatcatcgccgcggtgcgcgcgctggatgtttccaccgatgtgtgccggcgctcgcgaaccgttgaaattccagtgatttatgacggtgaggatctagccgacatagcccaattgcttggtgtttccgtgccgcaggtcattgcgcggcactgcgcccacgcatggtcggtcgcattcgttggcttcgcaccaggtttcgcctacctgaccggtggcgacgaaatcttcgatgtgccgcgccgcaaagtgccacgtttgagcgttcccgccggtgcggtgggattggccggcaccttttccggtgtctacccgcgtgtgagctccggaggctggcagttgctcggtcacaccgaaaagacgatgtgggatgagcataccgacccgcctgcgctgttgcagccgggtgatgccgtacggttcactcccgcgcgagagcgtgttgtggccggaactgcctcctgtttgtccgattctggagaatcggacaaacaggaccggattttggcattacagttgtccgattctccagaatcggacaaacggtgcggcccagattcatccatcatggcgaccaccgcgttggaggccacccgcccgggcctgctcaccactttccaagatgacgggcggtgcgcggcggatatgggtgtgaccggttcgggtgcggccgatccatgctcctctcatctcgccaacgcattggttggcaatcccacggatgttcctgttctggaaatcaccggcggaggagtgcgttttacagcacacggcgatatggtcgtggccgtggccggtgctcccgcaccaatcaccatcatcggcaaagccacatggaacagtggcttgggtgcgcaacgtaatgcgggaaaccagtcgcatgcatccgaacgtaccgtcgtgattcggcaggaggccatgctgttgcgtgacggcgaagtcatcgaaatcggcgttccgaccagcggattgcgcgactatctggcggtacgcggcggattcgacgtggcccgctcgctcggctccgctgcgaccgacaccatgagcggcatcggacccaagccggtcgcggctgggcagctcctaccggtgctttcgccgatcggacgccatccatcaacgatgcgtggcccgcgcccaaacggcgggcacggaaacagcataggtctaccggaaccatggcccgagcatctgccgaaatccggcgacattacggagctgcatgtgcgtttggggccgcgcgacgactggttcactgcgacgggaatcagcgactttttcgaccagatttggacggtcaccgcgcaatcgaaccgtgtagggctgcgcttgcaaggcgaacgttcgctggaacggcgtgatgctacggaattggcgagcgaggcaacgttgccgggctccatcgaggtgccgacgagcggtcaaccggtcattttcctgcgcgaccaacccgtgaccggaggctatccggtcattgccgtgctgacgtctgaatcgctgattttagccgggcaactaccgccgggcgccaaaattcgcttccgaatgtccgattctccagaatcggacaaacagaacacacaatcacaagagcatagggaggcccggtaatgcccagactgcagcgaatcctgatcgccaaccgcggcgagatcgcggtgcgcatcatccacgcgtgccatgacaccggtcgtacggccattgcagcttacgccgatccggatgccgacgcgctgttcgtacacttggccgacgaggcctatgcactgcatggggtggatgcaaaaagcacgtatctcaacattgacgcgattatagagaccgccaaaaaagcgcatgccgacgccatacatcccggctacgggtttcttgccgaaaacgcggactttgccgaagcggtggccgccgccggcatggcatggatcgggccgggagccgacaccatccgcatgctcggctccaaagtcgaagcccggcgtatcgcggccgaagtgggcgcacctatggcccctggcaccaccgagcccgtacgcgatccgtccgaggtcgtggcattcgctgagcgacatggccttccgctggccatcaaagccgtgtatggcggcggcgggcgaggcttgaaggtcgtgcaccggctggaagatgtgcgcgaggcgtttatgtcggccacgcatgaggccgagcttgcgttcggcaacggggattgcttcatcgaacgttttctggcacgtccccgtcatgtggaggtgcaggtgctgggcgaccgaaccggcagcgttgtcgcagtcggcacacgtgactgttcgctgcagcgtcgcaatcagaagcttatcgaggaggcgccggctccgttcctgccggatgagatcacgcggcggcttgaatcggcggccgtcgccatctgtaagaaggcgtgctacgagagtgccggaacggtggagtttctcgttgatccggacggcaccatgtcgttcatggaggttaacacgcgtattcaggtggaacatcctgttacggaggcggtgacaggcgtcgatctggtcgcggcgcagcttgcgattgccgaaggcgcgaggattcgcgagattcccggtctggaagacggctgcacacctgccgtgcatggtcacgccatcgaattccgtattaacgcggaggatccggcgttgggtttcgttccttttcccggtaccgttgacggattgcgggtgccgaccggcatcggtgttcgttttgattccggtgtcgcagccggcggtacgattcccggtcaattcgattcaatgctggccaagctggtgattgccgcgccttcgcgcgaagtttgcctggcccgcgcccgccgcgcattggctgagattgcggttgccggcattccgacggttgttccgtttgacagggcggtgcttgagcagcccgcttttgttgcggaagatggcgacttcggcgtgtacacccgttggattgaggaggagttcctgccatcggttgatgttgcggcgttgtcgggaggagcctgcggtagacgggccgcgccgacggatcccgttgaaagctggattgagattgatgggcggcgcgtacgtctcggcttgcctgcggggcttgcttcgctcgcctccttggctgcaggtttgtccgattctggtgaatcggacatgcagagtgcgtttcttgccccgcgaatgtccgattctggtgaatcggacaaccatggcggaggtacgcctcttgaatccacaatcactggcaccttggtccgttggctggctgatgacggcgcgcaggtatgcgagggagattcgatcgtggtgcttgaggccatgaagatggagaccgaaatcgcggcgtccgcgtcgggtacgctgcatcggtccgcgaaggtcggcgatttcgcccaatatggcgagaatctgggattcatcgaatagtctgcacttgcgtatgcgaacgtcttgcgtatgcgaacgtcttggaggagagggacatgcgtacaagcattttggattggcggcactacccgaccattgcgagaatcgcgaacatggccgcttgcgatgtcggtcgcggctcggagacgttgatgacgtattcccgcggcgacctgtttcatgccgcccgtcatttggtttccggcagaacagggcgttccggtaggaacggtctgccggcccgggcgctggtggttaccggattcttcattccgaaggccgaccagccggccgccgagacggacggtccgttgggtgcgttggaggtgtgcatggcgttgcgtgcgattggcggagacgcatggctggtcagcgacgaatgctgcgaaccggtgatccgcccggcggcgttgggattcctgccggaggaccatgtgctcatcgcacctgatgtgtccgattctccagaatcggacaattggagcatgaacagtgccccgcgtttgtctgattcgggagaatcggacaaacgggcacacggcggcaccccgttcgatgcctggctgaatcgcgtgatcgacctggtgcgcgccgaaggcatcagcaccctgatctacatcgagcgcgtaggtcctgcccgcgacggtaatccgcacaacatgcgcggcattgacatcactgaatggaccgcgcccctcagccaattgactctcatgggactgcataccatcggcgtgggtgacggcggcaatgaaatcggcatgggccgcgtcgaggattatgccatcgagggcgtggtggaccacggtatggatatcgcgtgcacggtgtcgacggaccagcttgtggtggcgggcacgtcgaattggggcgctcatgcgttggtgtgcgccatgcgcgcgttaggccgcacggaggtggatccgtatatggaggttgagtggcagcgcatggtgttggacgtgattgttgcgcacggtgggcttgatggtgtgcatatgacgaatgttgcgactgtggatggccttgattccgaccgttatttcgcggagatcatggcgctcgcatccgttgcgcgccggtgacgcatcgagctggtctgacacgccgacgggctgttctcgactggacaacgatgcccgttcggcggtaatatcgaaccggttcgatattcagggtggacgatatccgccgttgaacaatcgcaaacaatcatgatttggaaccgagggaggtcccatgaagaacaaagtgcagctcatcacttatgctgaccgtttgggcgacggcaccatcaagtcgatgaccgatatcctgcgcacccgcttcgacggtgtgtacgacggcgtgcatatcctgccgtttttcaccccgttcgatggcgccgacgcgggttttgacccgatcgaccacaccaaggtcgatccgcgtctcggcgactggaacgatgtcgccgagctttccacgacccacgacatcatggtcgacgccatcgtcaaccacatgagctgggaatccgagcagttccaggacgtgctcgccaacggtgaggaatccgagtactacccgatgttcctgaccatgagctccgtcttcccgaacggcgccaccgaagaggatctggccggcatttaccgtccgcgtccgggtctgccgttcacccactacaagttcgccggcaagacccgtctggtgtgggtgagcttcaccccgcagcaggtcgacatcgacaccgactccgacaagggttgggaatacctcatgtcgattttcgaccagatggcagcctcgcatgtgagctacatccgtctcgacgccgtcggctacggcgccaaagaggccggcaccagctgtttcatgaccccgaagaccttcaagctgatctcccgcctgcgcgaagagggcgtcaagcgtggtcttgagattctcatcgaagtgcattcctactacaagaagcaggtcgagatcgcctcgaaggtcgatcgcgtctacgatttcgccctgccgccgttgctgctgcactcgctgaatacgggccacgtcgagccggtcgcgcactggaccgacatccgtccgaacaatgccgtcaccgtgctcgatacgcacgatggcatcggcgtgatcgacatcggctccgatcagctggatcgttcgctcaagggccttgtgccggatgaggacgtcgacaacctcgtcaacgccattcacgccaacacccatggcgagtcccaggctgcgaccggtgccgccgcctccaatcttgacctgtaccaggtcaacagcacctactactcggcattgggatgcaacgaccagcactacatcgccgcccgcgccgtgcagttcttcctgccgggcgtcccccaggtctactacgtcggcgccctcgccggcaggaacgacatggagctgctgaggaagaccaacaacggccgcgacatcaaccgccactactactccaccgcggagatcgacgagaatctcgaacgcccggtcgtcaaggcgctgaatgccttggcgaagttccgcaacgagctcgacgccttcgacggtgaattctcctacgaggccgatggtgacacgtccatcagcttcacctggaagggcgacgccacctccgccacgctcaccttcgagccaggcaagggtcttggcgtcgacaacaccgcttcggtcgccacgctcgcgtggaccgatgccgccggcgatcaccgtaccgacgatctgatcgccgagccgccggtcgttgcctgacatacgggcctgcatccgccattgtccctcccgtgccggcaggcgtgggagggacaattcggcatttcggacgatgcggcccgtatccggcccttgcatgtaaggtgagcaccatgccaaagatgtcaaagctcttcgatcagaacaacatgttcttcgccatcatgggcgtactgttcgacctgatcatccttaacgtactcacgctgctgtgctgcattccgatcgtcaccgccggcgccgcgttcacggccatgcacagcgtgctgtggcgtatggtccgccatgaggagacgtacgttgcacgccagtttttcgagtcgttcaaacgtaatttcaggcagtcgctcctgccttggctcggattgctgcttgccgccgtcgtgcttgccgtcgatggcatgctcgcatggtcgatggcgtccatgcgtggcccgcttgtcgcctgcgtcgcctttgcgggactggtggtcatcgccattgcgcagtattttttcccactgctgtcacgctacgaagaccccactccggtgcatctgcggaacgccgccaaacttgcgctcggcttctttccacgtaccttgtgcatgctggtgatcctcgtcggtttcgccgtgctgtatatgcagttcttcgtctatatgattccgctgctgctgttgatgggcgtcacgttgccgcagtattgctgcgcttggatctacaactggattttccggcgtatcgacggtgagattgacacgggaggccggacgattccgcgatcatgaccggcatctgaagatggtcgcgctacctgccggtacgtgcagctcgccttcatcgacgcaggcgacggttccgatgtgaaacagcacgtcgtcttccgctgtgccgattgcatcgccatacgccgccgatagtgtgcagcgtgcgtctgagggcgacggattgatggccacgatgatgcgctcgctgggattcgcgtcatcggcttcgtcggccgttcttgcgtatgccagcgggtatgcgtggtcttcggcgtgcaggaattcgatgccgccgtccgcctgtagcgccgggtgcgccatgcggagggcgttcagggcgcgtactgtgcgcaacagcgagtcggaatccgtctcctgtgaagccacgttcggcgcgtctgcggcgtcatcgatcggcaggtacaggctttcccgccgcgcggatgagaatcctgcgttggtcgagtggtcccattgcatcggcgtacgcgaaccggttcgttcgtagccgccttccttggatttgagtccgtgtgcgtagcgcatgccgatttcgtcgccgtagtagatgaacgggcaacccggcatggtcagcaggaacgcgaatgcaagtttcatttcggcgggtgtcagggtgtcgcgcatgcggatcatgtcatggttgcccgacggaatgcagatgtagccgtcgcctgcggtgtcggtgagcagctttcggtatgtgtcggcgaacgccttgatgtcgccgttcgccgaggcggagaaatacggattctcccggaacaggtcgaggtagtgtgacggcccgaaatgcagcaggaagtccatgccgaagccggcgtgcagcgcctcacggggattgccccattccgaaacgagcaccgcttccgggtgcgtttcgtccaggtgggcacgcacctgccgccacagtttcgacgtccaacggtgttccggatcctctttgaccagactgcccgccatgtctacgcggaagccgtcgcaacccaagcccagccaaaagtccatgatgtcttgaatgagcaggcgtccggcctgcgcttcgggtgaatccgcagcgaattgccagtcttcggtcacggtgccgaagccgtagttcaggcagacctgcgtggagaagcagttgacggcggccgcgtccgggcgttcggcgatgccgcccagaaagccgcgaatcgatgcatatggcgaattcaggtcgggggattggctcatcggccgccagatgtagcggtcggtccatgcgttgcgttcgtccttgcaggattccttgaaccaggggttgtcgatggcagtatgacccggcaccagatcgagcagtacgtgcatgccgagttcgtgtgcatgctcgaacaccgctgcgaggtcttcgttgctgccgtagcgcgccgcgacggtgtagtagtcgcgtacgtcgtagccggcgtcgtagaacgatgaatcgaagcagggattgatccagattgcattgcagccgagattgcggatgtattcgagtttgctgatgatgcctcgaaaatccccgatgccgtcgccgtcggagtcccgaaaagactgcggatagacttcgtagaaaatcgcgttatttagccagtctgccataaaatctcccttgattggctggttgtgattatcgccttgcagtgtgctgtgaactgcagattgatgggggtatctggtgccatcataacgtgaggcaaggccttttctaaagtccaaaatggcagtatttgcaacacgtcaaacctttgacgcgacacgctggtgaaaggttggaaaaccgggttttatcgaaccggtttgacagttttgaagcggttgatacacttattgctcaggacggaaaatttccgacggcgcgagtcggaggttcctcctcacacctcatgaggcagtgttgcctgatgaacagtggaaatagaaagggattggcaatgagaacacttttttcgtggaagaaggccggcgccgccgtcatcgcttcgctgatggccgtcggcatgctgggcgcatgtggaggcggatcttcgaactccagcggcactaagatcaccatcttcaactccaaggtcgagatcgaaagccagatggaggagatggccaagaagtactccaaggagaagggcgtggacgtcgaggtctactactccaacgacaccgtcgccgcccatcttgccaccaagtacgcctccaaggatccatacaccatctccatggtcgacgccaaggacgtctactctctggctaaggaacacgccgtcgacctgtccgaccagagctgggtcaaagacaccgactacgccatcagcatcgacggcaagacctacggctacccggtctccattgaggctcgtggcctgatctacaacgccgatgccatcaagaagatcaccggcaaggagttcaagccggaggactacaagacccttgactccttcaaggagctcattcaggagctcaaggacggcggcatgacctccccgaccggcgtgatgaaggaagactggtccttggcggcccacttcctgcctgaggtctacgaggagcaggaagatccgaatgcattcctgctcgacatgaaggccggcaaggtcgatctcaactccaatgccaagtggacctccctgatgaacttcttcgacgtgatgaaggagaacaactacgccaagtcctccgccatctccgctgaacgcgaggtgaccgagcagaaactggccgagggcgagatcgccttcatgttcggcggcaactgggattggtccgtgatcaaccagtatgactactccaagaacatgggactcatgccggttccgcagaacatggacgacggcaccaatgagaagcttgtcggtggcggttccaagtacttcttcatcgactcctccgacaacacctccgacgcgcagcgcaaggccgccaaggagtttctgacctggcttgccgaagacaaggacggtcaggaattcattaccaatgaagccgccttggtctccccgttcaagagcaacaccctcgaggtcgccgacccgctgagcaagtccgtgaagtcctatgccgacagcggcaagctcatcccgaactacaactacctgccggacgatcactattccgtgctgggtgccaagttccagaagtggcttgccggcgaagaggaccgcgcaaccctcgccaaggacatccaggattactggaagaccgccaagttcacgggcgaatccgcctgattcgccgggtaatgcaccatgatgcgggggtcgtcgtcggcaccggcggcggcccctgcatcgccggcatggatgggattcatcatgaagcagaataagctttcctacaaaatcggccagtatctgatgttcggcggcccggcgacgatcctgttcttcgccgtcgtgatcctgccgttcttctatggcctgtacctgaccttcaccagctgggacggcgtttcggcgaagaagccgttcgtcggtctcgacaactacaagacggccatcgccgacaccgcgtactggcagtcgctcggccgcaccttcgtctactccgtcattgcggtcgtactcgtcaacatcgtcgccttcctgctggcctacatggtgaccagcggcatcaaggggcagaacttcttccgtgcgggcttcttcattccgaacctcatcggcggcatcgtgctgggctacgtgtggaagttcgtgttcaaccgtgccttcgtcgccatcgccgaggcggccacccaatccgaccacgcatcgttgctgtccacgccgaacggcgcgatgttctgcctgatcctcgtatcggtctggcagtacgcgggctacatgatgctgatctacgtggccggcttcatgagcgtggatcagagcctgaaggaagcggccatgatcgatggctgcaacaagggcaaggccatgtggcacgtggtcatcccgctgatgcgcgcctccttcgtgcagtgcatcttcctgagcaccacccgctgcttcatggtctacgacctgaacctttcgctgaccaagggcgagccgttcaatcagtcggtgctcgcggccatgcacgtctacaatcaggcattcgtttacaagaactatggcaccggtcaggcggaggcgttggtcctcttcatcgtctgcgcagtgatcggcatgctgcaggtgtacttcggcaagaagggtgaggtggcagcgtaatggaaggtcaagtcagcactcgcaccaaggttctgcacgcactgatggtcgtcgtcttgacgatcgtgctgctgctgttcatcgctccgttcatcctcgtcgtgatcaacgtcttcaagacgaaagcggacatcaacacggagccgctcgccctgatcggcaagcacggctttaccctggacaacttccccagggcgatggagaagatgaacttcctcaccgtgtttggcaactcggcgatcatcaccatcagcgccaccatcctgactatcctgttctccgcgatgtgcgcgtacgtgatcgtgcgcaatccttcgtggaggttcggcggcgctgtcttcgcacttatggtggcctccatggtcattccgttccaggtgctcatggtgccgttggtctccgtgtatggcggtctgctcaacgtgctgaacagccgcatcacgctgatcctcatgcataccggcttctcggtgtcgttggcggtgttcatgttccacggcgccatcaagacgaacatcccgaacgagcttgaggaggcggctagcatcgatggctgttccaagtggcgtacattctggaccatcgtgttcccgctgctcaagccgaccgtcgccacggtcgccatcatcgacgccatggctttctggaacgactacctgctgccgtccttggtcttgggccgtcgcgaactgtacaccattccgatcgcgacccagatcttctatggcacctactccaatgacatcggcctgatcatggcggccctgctgctggccatgctgccgatcctcatcctgtacctgttcctgcagcggtacatcgtcgaaggcgtcacctccggcgcggtgaagggctaagtcatgatgtgcggtcgcatatgtccatgatgtggccgcacgtcgcatgcagacgggtccggatgcgaatcgagttgcgcatccgggcctttttcatgcctgcatgcgcggcatgacgttgtgcgccttggtagggaacatcgggggatggtgggttttccgtaggcgtaaaacgatgtcgaaccggttcgacacgcgcggaagaacccagaattgaaatacgctcggttccgagatagtatcgaaccggttcgatactgaggtcgggccatataaaaggggtttatcatggacaagttcgttcgaccgggcattgacgaccgcccggattatgacaagactttgactccggagcaaaaggaagcggtcactcgtttggcggcatcgatgcccgaacgtcgagccggggatgccagccagaccgacgcgcaggtgcaagccaccaatctcgccgcggcatccgacgccgcaggttccggtctcggcgccatcgccgccgtggacaccgccgtaccggatccatcctccgccttcatggacatgcgcgatccgatggtctccgccgacggtcaccgcccgaccaaaacggaggtcatccgcctcggcatcggcttcaccatctccgccgtggcctgtgccatcccgtgggtcgccctgagttccatcatcctgccgcgcgtgttcgaatccatcgacccggccagcaaggagtccatgctcggtctggtcaacatcttcggatccgtggtggcgctgctcgccaacatcgtcttcggcaccttctccgatctgacccgttcacggttcggcaagcgcactccgtggatggtcgccggcggtctggtgaccggcctgagcatcggcgccgtctcgctgacccattccgaaccgctcatcatcatcctgtggtgctgcgcgcagctcggctacaacatgatgctcgccccatacgtggccaccatgtccgaccgcgtgcccgacaagttccgcggcaccgtctccggtttctacggcgcgggcatcgccgtcgggcagaccctcggctccttcgtcggcgcacagctgctcaagcagggcgaggccggcatcttcggcggttggatgatgggcatggccatcttcagcctcaccggcatcgtcgtggtgctcatctggcctcgcgagaaatccaatcgcgacgaggcccgtggcgaactcaacgtcaggtccatgctcatgagcttccgtccgccgaagaacgcgcccgacttctactacgcgctcgccggccgcaccatgatgatgggcggctactggatgatcaacacctaccagctgtacattgcgcaggattacgtgttcgccggcgatcccggcgccaacgtcaaggcggcggagcttatcgccaccatggccgtcatcacgctggtggtctccctgattgccgccgtcgcagcaggtccgatcaccgacaaaatcggcatgcgcaaagtgccggtcgccttggccagctgcctgttcgccgtcggtgcgctgatgcccatgctcttccgctccgccaccggcatgctgctgttcgcgggcgtcgccggactcggctacggcatctataacgccatcgatcaggcgctgaacgtctccgtgctgccgaatccggaggaagcgggcaaggacctcggcatcctgaacctcgccaatacgctctccaccgtgatcggctcgggcatgacctcgattctcgtcgtgatcgtgaaggccgtgatgggcgtctccaagaccccggtcgtcgcctacaccgtggtcttcggcgtggccatcgtcatcgtgctcatcgccgccttcctgatcatgcgcatcaagaatgtgaaatgagattattctcagcatgttgatatagtttctctcgcaaacgatcgcccgaacgcaccgacgcagtgtgtccgggcgatcggcgtatatgcccctgagagaagactttccatgactgacgataaccagaacgaaaccatgcccactccgcagccgttgcccggtcaggtattcatccgtcccggcatcgacgatcgacccgattacgagaagacgctgaccccggaagccaaggccgccctgaagcgtctggccgtgcagcagcgtccacgtgtgccggaagcctccaacgaacgcccggaagtgcaggccgcccgcctcgcggaaggcggctcaccgctgaccgcggccgcgcatctcgatgcggccgtgccgaatctggaatcctccttccttgatctgcgcgacccgatgaccgcccccgacggcagcaggccgaacgcattgcaggtcaaccgcctcactgcgggcttcgcgctcggctcactgctgttcgccgcaccgattgccgcacttgacgttgtgctcatcccgcagcgcatcgaccagctggtcggcgacgggcgtgttgccggcctcgccctgaccatggcgctcggcatggtgctgagcttcttcatgaacgcctggatcgccgtcggctcagaccataccttcggtccgctcggccgccgcaccccatggatcatcagcggagcgctcctgagcgccgcttcactggcgatactgtcggtatgcgacctcctgcagctcgtcgtcgtgttctggctgctcatgcaaatcggctatgccatgatcgccatgcctctggccgcggcattcggcgaacgcgtgcccgacaagttccgcgaccgcgccgattcctggcatggcatggggcttgcgctcggccagttgctcggcattctcgtggccgtctaccgcaccatgcatcccgctgaatccggctgggatggcaccacacgctcgggcatcatgctgttcgccatctggttcatcgtggcaggcatcgtcacgttgctcgtactgccgcgcgaaggctccagcacctacatgccgcgcgagagcgtgcgcaagggctcgttcttctcgcagtaccggcctccgaagcatgcgccgaaattcgccgtcgccttcatcgcacgcatgctggccgtcgccgccaccacgctgattgccgtataccagtggtatctcgcggcattcgatctcgacgccgacgggctgtccggctacggcctgaccggtgccggtgcggtcgtggcgtcgatggccgtcgccgctttcgtcggttcgctgatggccgtgctactgctcggtccgatcgcccgtgccttcgaagacgcccgtgttcccgccgtcatctcctgcatgctgttcgtgattggcgccgcagctccgtgcatgatggccgacaaactgttcggcgtcggcctgtacgcactgatcgccggtttcgcctatgcgatgtacgacggtaccagccaaagcctcaatctggcgactctgccggatgtacgctccgtcggccgttccctggcggccttcagcgtggccaatacgctcggctcgctgcttggcgtcatcgcaggtgcgcttgcgattaccgcacttgcggcatacctgccgctgttcggcgtcgccatcggcttcatgctgctggccggcgtgctgacgatgctgctgaagtgattgtacgcgtccacatagtgaacctttggtggagagggcgagtgggcgcgcttatgtttaccgcttagttcgagcgaagcgctcgccgaacgtcaagactttgcgaaaggaggtccgccatgatgaacggaatggttgcacgcgtactgctgtccgcacgaattattattccgctttcgttggcggactgattcgagcaatacagcttcaatccctcgccaacggaggcagggtttgaagcgcgcgaaacacacgttgaaggccctgcatgaagcggggccttttgcgttgccgcccacaaggcgtgaaggcaacggagtggattgaagccggcaacagaacgagcagcgttatcggcgcaagttgggagtcggtaacgcgtgagacgtacaggagtacatcaatgagtgcagtcgagacagctgccggcaaagcacaggcgatggtgcgcgattcggtcaagaccgtaatcgccgcctccatggtcggtaccgccatcgagttctacgacttctacgcatacggcaccgccgctgcaaactattttccgaaggtcttcttcggagacaccgccaacccgaccgtggcgttgctggccagcctgctgactttcgccatcgcgttcatcgcccgcccgctgggctcgctggtgttcggccatttcggtgaccgtatgggccgtaagaccacgttggtggtctctctgctcaccatgggcattgcaacctttctgatcggatgcctgccgacgtacgaccagtggggcgtcgttgcggtggccgtgctgtgtctgtgccgcttcgtacagggcatcggtctgggcggcgaatggtccggagcggctctggtcgccaccgagaacgctccggaagacaagcgcgcactctacggctccttcccggagttgggcgccccgatcggcttcttcctgtcgaacggcacctacttcctgctggaaaccttcaatgatgaccaggccatgctctcttggggctggcgtgtgccgttcctgctgtcggcagtgctggtgatcgtcggcctggtcgtgcgcgtgcagatggaggagactccgatcttccgcatggcgcaggagcagaagaaggtcgtcaagtcgccgcttgccgaagtcttcaggaagagctggaagcaggtcatccaggccacgttcctggtggccgtcacctatacgctgttctacacgttggcgacctggtcgctcgcatggggcaccaagagcgtggaagacggcggtggcgacctcggcttcaccaatcaggaatatctgttcatgctgatggtggccgtgtgcgtattcgccgcattcatcatgatctcctgcgtgaacgccgacaggttcggccgcaggcgcgtgatcgtcatctcgtcctgctgcctcgtggccttcgcgctgctgtttccgttcctgcttgattccgcggtcgtcggacagcgcaacttcgtggccaacctcgccttcctgtgcatcggcttcgcgctgatgggcacggcattcggtccgatcggcgccttcctgcccgagctgttcgacgccaatgtgcgttactccggctctggcatcggctacaacctggccgccatcgtcggcgcggcgttcgtgccgaccatcgccacctggctgtcccaccactggggcgtgcactccgtgggcctgtaccttggcgtgatggccttgtgctgcctcgtcgccgtgttgagctgcagggagacgaaggacgtcgatttcaccaagtaagggtgccgataccaccgtgaaaaaccgttcggcaaaaaacatagtcactatgtgaacgccgacaaccaccataaagaaagcgggactagaacggttccgcaggagaggcggggcgagttccgcggacacaatccggggggagcaacatcctaggaatcgcaagccgccgcaacaaccgaacaacagaagaacatcgcgaacaatccgggaagactttccatcccgcaatcacgaaaaacataaaaggagcgccaatcatggcagcaactatctggtacgaaaaggacgccgatctgtccgtgttcgatggcaagaaggtggccgttatcggttacggttcccagggccacgcccatgcgctgaacctgcgtgactccggtgtcgacgtggtcgtcggcctgcgtccgacctccaagtccgtggaatacgccaaggagcagggcctggaggtccagtccgtggccgacgccaccgccgaagcggatgtggtgatgatcctgctgcctgaccagtatcaggccgccgtctacaagtctgagatcgagccgaatctgaagccgggcgccgctctggcctttgcccacggcttcaacatccactacggctacatcaagccgagcgaggatcacccggtgttcatggtcgcgccgaagggcccgggccacatcgtgcgccgtgagtatgccgccggtcgtggcgtcccggtcgtggtggccgttgagcaggatccggatggcaagacctgggatctgtgcctcgcctatgccaaggccctcggtgccctgcgcgccggcgccatcaagaccaccttcaccgaggagaccgagaccgatctgttcggcgagcaggatgtgctcatgggtggcatcaaccacctgtgcgacatgggcttcgacgtgctgaccgaggccggctatcagccggagatcgcctacttcgaggtgttccacgagcttaagatgctgatcgatctggccaacgagggtggcctgaacaaggcccgttggtcctgctccgacaccgcccagtacggcgactacacctccaccgtgatcaccgaggagaccaagaagcgcatgcagtatcagctcaagcgcattcaggacggctccttcgccaaggagttcatggatgaccaggccgccggtgcgccgaagttcaagcagctgcaggaggagtacagccacccgcatctggagaccgtcggcccgaagctgcgcgccatgttctcctggaacaaccaagtggacgccgatgccgatatggccgagtccttcaacggtaagatcgcccgcacccaggtgcagtgagccgtcgcgccgcttgacgcaagttgatcgctgactggttctcagcctgattcggctgagatacgaaaccgccatccgttccgatacgggtggcggtttttcgattttcggctcttgactcggtgatttttcggtgctatggctcaccttttggactgagtggcggtttaggagtgcgctcgggtaggatagaccccagtttgcaggacaaaatccatgcacgaaaacacgaatttcatatctgcgaatggtagaaacccgaacgctttggtggcgttcaccccactacgataaaaggagtgccaatacaatggctgcacaaatctggtacgagaacgacggcgatctctccgtcctcgatggcaagaaggttgccatcatcggttacggttcccagggccacgcccatgcgctgaacctgcgtgactccggtgtcgacgtggtcgtcggcctgcgtccgacctccaagtccgtcgagcaggccaaggagcagggcctggaagtcaagtccgttccggaagccgccgctgaggccgacatcatcatgatcctggctccggatcagtaccagcgcaccatctgggccaacgacatcgagccgaacatcaagccgggcgcggccatcgccttcgcccacggcttcaacatccactacggctacatcaagccgagcgaggatcacccggtcttcatggtcgccccgaagggcccgggccacatcgtgcgccgtgagtacgccaacggtcgtggcgtcccggtcgtggtggccgttgagcaggatccgcgcggcgacgcttgggacatcaccctggcctacgccaaggccctcggtgccctgcgcgccggcgccatcaagaccaccttcaaggaagagaccgagaccgatctgttcggcgagcagaacgtgctcatgggtggcgtgaacaagcttgtcgaaatgggcttcgaggtcctcaccgacgccggctatcagccggagatcgcctacttcgaggtctgccacgagctcaagatgctcgtcgacctcatgaacgagggtggcctgaacaaggcccgttggtcctgctccgacaccgcccagtacggcgattacaccaacaccgtcatcaacgaggactgccgcaagcgcatgcagtaccacctgggccgcatccaggacggctccttcgccaaggagttcatcgacgatcaggatgccggcgctccgaagttcaaggaactgcaggaggagtacggcaacgttcgcatcgagaccgtcggcccgaagctgcgcgccatgttctcctggaacaacggccaggacgacgacgccgatatggctaccttcaccggcaagatcgcccgttctcaggtgcagtgagcatccgcggatcggctgactgaaaccggctgaccagcaatcgatgaaaggcgaccacccccacttgaaccgcaccccgattattggactgaagaaattcggattcgatgattggaggtgtggttctttcgtatgcgtgaggatcggaggaagcactatgacgacgagttccggcgcgaggcgctgaggctcattgaggccggcgtgggcaaacgctccctcgcccgtcggtttgcgatgcccgtgcagactgcggaaaaatggatcatgctgtacagatccaacggcggggaggcggtcatgggaaccaccggcaacaggcgttatgactgggagacgaaggtcgcggcggcgcgggaccacgtcgagaacggcttgagcgtggccgaggtcatggccaggtacgggatagcgagcatcgccccgctgcagcgttggtgccgcgaataccgtgccggtggcgcggaggcgttgaggccgaagcccaagggcaggcccaaaggcgcgaaatccaagccaaggccgaaacccacgcgggagcaggagctgaccgaggaggtcgcctacctgaaggcgaaggtcgcgtacctggaaaaactccgggccctgcgggcgcagaagtcacgaagcgcgagcgaagcgccgtcgtccgactgctcgcagggcaggggcaccggctcgaccacctgctgaagatcagcgggttggcgagatccacgtatttccaccatctgtcgcatccggcgcatgagacgcgccccgacctcgatcccatggtcgcagagatctgggaaaggacggccaacgggtgcggccaccggcagatccatatgtgcctggtccacgagttcggacagaaggtgtcggccaagagcgtcctgaaggtcatgcgccgcatgggactcagatgcccgatccgcgccgggaatccatggagaggctacagctcgtacaggggcgacgctggcggaggggtgccgaacctgctcaaacgcgacttcaccgccggcaagccgttcgaaaaactcggcaccgacgtcaccgaattcaaggtcgcgggcggcaaggcctacctcgcgcccgtgtacgacatggccagcaaggaaatcgtcgcctgggacgtgagccggcaccccggcatggggcagcagcggcgtctgctcgccatgctcgaagccaggctgcccgggggcgcgaacccgatcctgcactcggacatgggatggcagtaccagcacccgtggtggcgcggggagctcgaacggctgggcatccgccagtccatgagccgcaagggcaactgcctggacaacgccgccaccgaacaggtcttcggacacctcaaggacgagttctaccgggggcgcgaattcgactcgtacgagcaattcaaacgagaacttgacgcgtacgtcatccactggaacaccagacgacgccagatacgactcgagggacacaccccggaggaattccgaagcgtgtccctcgcagcctagacctgtatcctatttaacaacgtccaacaatcggggcgcagttcaactcggagtggtcgcctttttgcatggcatcccaaccctatgccaatggaagcagacgcaggaggggcggcataacgttgtgccgcgtacgattcggtggcgtgcacgcggtcacttcgaggggatgataggtggtaacgccgcgttggcaggacactcgccagatgattgattgccggattttttatgagttttcgcctacgatttgtgcataggacgattcgataggaagagaagctatggttacagcgactggtcccgcacccggttccgacatgatgacctcggctgagccggcggaaaaccgtaccgcatccggagtgctgtacgtcgctccgattttcgcctcgcacatggtgttgcaacgcaataagccgatcgtggtgttcggcgcgttgaatgccgattgtgccggccttgaggttacggcagcgatctgtacgcctgacggttcccctgtggctcaggcgcacgcctacgcttcgatggaggtcaggcatggcttctcctactggcgcatcatgctgccggcccagtccgaaggcggcccgtacacactgcgtgtgaccgcgggcaacgactcaatcgaattccatgatgtgcttatcggcgaggtctggctggccggaggccaaagcaatatggaacttgagttgcgcaacagcgatgatgccgatgcggagctcgaggactgcaccgatccgctgctgcgcttctataatgtgccgaaaaccggtgtgatcgaccgcaatgccgagaatgcctccggctggcaggagtcctctccggaaaacagtggtgtgatgagtgccgtcgcctactatttcgcacgcaagctgcgcgacgagcttgatcccgatctgccgatcggcatcatcgactgctatatcggcggtacgtcgatcagctgttggatgagcgaagacgccctgcgatccagtgaagcggggcagggctatctcacccgattcgacgaagcgatcgcgggcaagacgcaggcgcagttcgatctggagacttccgcctggcaggaacgtttcgacacttggaacgcttcgatcgcagctgcgcgcgaagcggacccggatgtcacttgggatacgttgaaccaacgatatggcgaatgcccatggccgccgccggtcacgccgacctcgcagtggcgtccgacgggtccgttccatgccatgctcgaacgcgtcgtgccgtattcgctggcgggattcctgtggtatcagggcgaggaggatgaaccgtactgcgaatcctaccgtgagttgcttggcatgatgatcggtgaatggcgcgcgttgtggagcgagaatctaccgttcctcatcgtgcaactgccgcagtggatcgataagggccatgccgacgcgggcaccgatccgatgctctggccggtgttgcgcgaggcccagtgggatgcggcgcagaccatcgacaatgtgtacgccatctgcaccattgactgcggagaattcgacaacgtgcatccgaccgacaaacgcacgccgggcgaacgcctggcggagtgcgcgttgcggcagatctacggccttgacgacgtgccggtgtacggtcccacggtgttgggattccgttgcggtgagaacggccatgtctgcctgttcttccggtatgcgcacggtctgcatttcgagggcgtcacaccggatgataccgatgatgatttcgtcgaccaattgccttccctggtgcgcaatgccgagcgttccggttttgagttggccggtgtcgacggtatgttccatccggcgacggcggcgattttcgtggattgcgatatcgaagatctggtcaatgcgaagatcaacgtggtcgactacaacgctacggaattcggcatcccgatcaacagccgcagcatcggtacgatcacgttggcaacctccgaggtccccaagccggtggcgttgcggtacgcctggcacagttgggggccggcgccgctgttcaacagcgacgacctgcccgcccagccgttccgtttggatctcaccgaccgcgaggactgaaggtagggcggtagccgatcgcccggttgctgccggaatcgcatcggtgttcggtcccgcacgtcactcccatacatccgggccgaaggactccaggtaggcgaccagctcgccggccatctcctcgtcctcggggatgcgtggatggccgtgggtgccggaggcgttgcgggagtaaaggaaatgctctacgcggatgtcgccttcggaacgtaccgtctcgcacacttcgtcaatcgcacggtcccatgccgggtcgtgcaccagaatcgtggtggcgagcacaatcagcgccttcggatacctcgcacgtagggcatgtatgaaatcgacgtagcgcgtgcgccagtgccgggccgcttcacccgcgtaatccgacgccatgaaatcatgcggatgcgcatcgttctgccctaatgccacgagcacgacatgcggcgtataccgtgtgaactcccaaggcttcgtctcacccaacgccggattgtatgcaatgcggtcccacatgctttccatgcccagatagtgcggtgcattgaaccagccgatgccgtcgagcaggggagcgccgccctgcgatatgtcgtgcagttccgcgccgagcatccgcgcggcaatcgccgcatacgaatgccagctgtcggaatacccgctcagatcgacttccggatcggcctgacctacgtagcgtatggcctcgttgcgttcgccgcaggagacggaatcgccatacacctccatacgacgtggcggtcgcgcatcggccggcggcaggatggtcgcgccgtcatccagttcgatgccgagcatctcaagatgacacatgccgccgtcctgacgcttgaagatcgtcacttcatgctcgatatccggcagatgctcggctagggtgatggtcgtggcgtcgattggcaccggcactttcacttccagtccgtcgatgatggctccgagaaagatgtcgccgtaattccagtggttgcgtagctttacgcgtatgtgggagccggtgcagcggaacgagacctgcgtatatgggaacacccagatcggtgctttcggattatcgtcatcgatgcgtcccatgaatcgcagtgccggatcgtcaaatgtgattgtatgcatggaaagcttccttaccttctgattcacatctttgaggcaatcatagagatatccgttacctcgcgcgcattccaggtgatgatgatggcacccctttcgtgcgcgttgccgagggcggtactttagaataaaagaccaaacactatcttaaccgcttcaggaaaggacgtgcaatggagaacacattcccgaaggatttcgttttcggtacggctacggcagcctatcagatcgaaggcgcggtgaacgaggacggtcgctgcccctcgatctgggatactttcagccatactccgggagccaccttcgcaggcgataccggcgacgtagccacggattcataccatcgttggcgggaggatctggcgctgctcaacgatttgggcgtggatgcctaccgtttctcgatcgccatgccgcgcatcatgcccacgccgaacggcatcccgaatgcgaagggtctcgacttctacgagcgcatcgtcgataccctgctcgagtacggcatcaagccggtcgtgacgctctaccactgggatttgccgcagtatctggaggatgcgggcggctggctcaatcgtgtgacctcctatgcgttgggcgactatgcggccgtcgtcgccaaacggcttggcgaccgcgtcgacacatggaccacgctgaacgaaccgtggtgcgcctcatatctgagctatggtgcgaaggagcaggctccggggctgggactcggtccgggcgcatttccggcggtgcatcatctgaatctcgcccacggcctgatggtgcaggcggtgcgcggcatcgtcggcgacaagtcgaagtattcggtcacgctgaacatgccgttcaatcgcggcgatgccgatgcctgccatcgtctcgacctgatcgccaaccgtgccttccttgatccgatgctgcgtggccgctaccctgacgaactgttcgccatcaccaagggcatctgtgactggagcttcatacagccgggtgacctggagaacgcgcaccagccgatcgatgtgctgggcgtcaactattactccaccaatcgtgtggccatgagcgaccgtccgcagttcccgcaggagaccggcccttccacctgccccggcgcctccgacatcgattggctgccgaccgacggtccgcacaccgacatgggatggaacatcgacccgcagggcctgtacgacacgttgatgcgtgtgcatgaccgctatccggaggtcgatctggtcatcaccgaaaatggcatggcctgcagggaccagctggtcgtgaacgagggcggtaccaaggcggtgcatgacgtcgatcgcatcgattatcttgagcgacatttcgccgccgcgaagcgtgcattggacgatggcgtgccgctgagcggttacttcgtgtggtcgctgctcgacaatttcgagtggtatttcggctatgccaagcgattcggcatcacctacgtcgattacgccacccaggagcgcacgaagaaggacagcttcctgtggtaccgagacttcatcgcctcgcgtggctgaggggtcgatgacatccgtgatccgcaccatgactgaggtgggtggatgggtgtggccgtcgcgcattccgttcgtgcttaagtctgccgacgcgtcacacctccgattggcgcaatgcgccgatttccagtgtgactacggcatggcgacgggtaaacaaagggtacttaagcgcttaacgacactcgggtaaagaaattaacgttaacgccattaatgttaacttactgaatgcttgccggtattccgataggatgccgaaatagctgattttccaacgtttaaagaaaattgagaaaatgctgagaatgtgcgattggctgaagaatcgcacggctgtggcgcgacacgacacaacttaagcgcttgacaaacttaaggggttcacttatcgtaataatcaccacttcatcaaaggcaggcagagaggcctgagatgagaggcatcaccaacgaagaatcggtgccgagtcttcaacggtgatgaacaagtgattcataaggaaggatcagaagatgaatctcaagaagatcgtcgcagccggtgtcgcggccgtctgcgcggtgagcatggcagcttgcggtggcagcaacgactccagtggcgtgacggacctgacctacgacaagatcaagctcggcgagaccggcaaggacattacggccagcatcaagttctacaacggccgtaccgacatgggcctggattcctatccgggcaagaactggaagtcctacatcgccgacttcaacaagatctatccgaacatcaaggtcgaggcccagaccgacaccaactacgcagataacgcgctgacccgcctgcagggcggcgactggggcgacatcatgatgattccgtctgtcgacaagtccgaactggagaactacttcatctcctacggctccctcgataccatgcagaagcaggtcaagctcgcctccgagaaggcttacgacggcaagtcctacggcgtcgccaccgacggccagacctccggcgtcgtctacaacaaggccgtcttcaagaaggccggcatcaccgaactgccgaccactccggaagagttcatcgccgacctcaagctcatcaaggaaaagaccgacgccatcccgctgtacaccaactacgcggccggcttcaccatgggcgcctgggatgcctacatcggcaccaccgcaaccggtgacaccaagtacatgaaccagaagctggttcacaccaaggccccgttcaaggatccgggtgacggcacccacgcctacaacgtctacaagattctttacgatgccgttgccgacggtctgaccgaagaagactactccaccaccgattgggagtcctccaagagcatgatcaacaacggccagatcgccaccatggtgctgggcgcctgggccgtgacccagatgcagcaggccggcgacaacgccgacgacatcggctacatgccgttcccgatctccatcaagggcaagcagtacgcctccatgggcggcaactactccatgggcatcaacaagaagtcctccaaggacaaccaggaagccgccatgatcttcgtcaagtggctcaccgaggaatccggctacgccatgaacgaaggcggcatcccgatcaagtacggcgagaccgacctgccgtccatctacgaggacttcaaggacgtcaccatggagcctgacgcagactccctcgaaggcgaagaggatctgttcaccgaggtcaactccgactccgagctgggcatcaactccaacggcaacaagcgcgttcaggccatcgtcgagcacgccgccaacaaggacaagtccttcgacgacatcatgaaggactggaacgacgcctggtacaaggcgatgcaggacgacgacgcggaagccaagtactgatcgtcgccggccggcctaggccagccaagacttctcctccatccctttctcctgccggcgaccgctcccaaccggttgcggccgccggcttttcatatcactggtacgtcaacgaaaagagagaatcatgactaccgcgattgcgggtgccacggccacctccgtggatgacatccctttcaatccccataagcgcgactacaagaaggccggcatcatcgtcgccttctgcgtcatcccggtcacactgctcgtggtgttcacctactggccgttcatccagatgtgtggatactccttctacaagatgaagtacatcggaaccccgcgcttcatcggcatgaagaactacatcgacatcttcacccgaccggagttgcttgccaccctgaagctcagcctctactacatggccggcgcactcattcaggtggccctggccctgtatctggcgaccgtgctggcgttccacgtccgtggcggctcgttcttcaagggcgcgatgttcttcccctacctgatcaacggcatcgcagtcggcttcatcttcaagttcttctacacccgtggctacgtgctcgacaccgtgcttcagtggtgcggtttcacccaggacacgctgccgtactggctgagggaccagtccatcaacaactggtcgctggtggcctcctccatctggcgctacctcggctcaaccctgatcctgttcatcggcgcgatcatgtccatcgactcctcgctgtacgaagcggccgaaatcgacggcgccaacaaatggcagcagttcaagcacatcatcctgccgggcattcagactatcctggtgctgaacatcatcctgtccatcaccggctcgctctccgccttcgaaggcccgtacgtcatcacctccggcgccaacggcaccggcacctacatggtgcagatggacaagatcgcacacaccgaccagaaggtgggcctggcatccgccatggccgtgatcctgctgatcatcatcatcatctgcaccctgctgcagaagatcgtcatgggcttcctgttcagggatgccgacgacggtaccgcaaaggcccgcaagcaggccaagaaggccgacaaggcccgcaggcgcgccatgaaggccgccaacaaggtccaggccggcaaagctccattgttcaagaacggaaaggtgagtgcgtgatgactactgcaaccgtcgcaccgcaggccgaggtacagaaggtaagcttcggctatcatctcaagctgtgggttctgagcttcctcaagtatttcagcctggtgttcatcaccttctggattctgctgccgctggtcacctgcttcttcaccgcggccaagggcaccgacgagtggcgttccacctccgtgatgaccttcccgaagaacatcttcaacttcgagaactatgccgaggccttcaagttgtcgaacatgggcatcgccttccgcaactcggtgatcgtgctcgtgtgcgtctgcttcctgaccaccatcatcggcacccagctggcctatgtgctgtcccgcttccagttcccgggcaacgccctgatccgtaccgcgttcatgatggcggccctgctgcccggcatcgccatgcaagtcgcggtctacaagatcatgggcaccttccacctgatcaactcgctgtggggctacatcatcatgtcgatgggtaccgacgtgatctcgatttacatcttcatccagtatttcgagaatctgtcgatctccctcgatgaggccgcgctgatggatggcgcaagctacttcaccatctacagccgcatcctcctgccgctgctgaagccggcaatcgtgacctgcctgatcctgaagggcgtcggcatctacaacgagtactactcagccaacctatatctgcaggacaagcagaaactcggcacggtggccatctcgctgtacgccttcaccggcccgcagggctccaagtacaacctgatctgcgcaggcgtgatcatcaccctgctgccggccctgatcgccttcctgatcttccagaagcagatctacaacggcgttgcggcaggtgccgtgaaggaataatccttcgcacatataactgaagactctcttttcatcatccaaggccgtgccaagatctatcatcgccggtacggccttacccctcttttcttacaaaggattcctcgcatgactcacactcctagcacgttcgccccgcttgcggacggatggacgctgacggccgtcaacatcgaagccgcccctgaatcgctacgcgaagcgctcgccgctggcattccggctaccgtgccgggagaggccacgctggacctgctgaacgcgggactcatcgccgatccgttcgatggcgccaacgagaacgaccagcagtggatcggcgacgttgactggcgcttcacctgccgcttcgattggcatgacaatggcgccgaccggcatgatctggtcgcctacggcctcgacaccatcgccgatgtcgcgctgaacggccgtccggtcgcctccacccgcaacttccaccgctcctaccgttgggacgtgcgtgacctgcttcgcgagggctccaacgaactgaccgtcaccttcacttcgccggtacgcgaatccgatcgtatggagcaggcccgcggctactatccgcataccgagcatcatgcattcaaccagattcgcaagccgagctactccttcggctgggattggggcatcgacgtggccaacgccggcatctggcgcgagatcggcatcgactcctggtccggggtgcgcatcgcctccgtgcgtccgctggtcgacgtcgccgccgacggcaccggcctgctcaacgtgcatgtcgagatcgaacgtgctggcaagggccgcatcatgtccccatacgagtgccattccgtgcgtgccgcggtgccggtacatgtcggcttgtccggcttcggtgccgatgtcgccgccgacggcgtggtcgccgaaggccgcaatgaaaccgtgctgacgctcgccgtaccggaagcgaagctgtggtggccgatcggttacggcgatcagccactgtatgatgttgccgtcgctgccggcgattccgccgaagcggcttggaacggacatgtcggcttccgtaccgtgcatgtcgacacccgtgccgacagcgtcggtcgtccattccagatctacgtcaacgacgtgcctgtgcacgcgcacggctacaactggattccggatgatgccttcatcgcccgcgtggctgagcgcgactacgaacgcggcatccgtgatctggtggagtccaactccaacatggtgcgtgcctggggcggcggcatctacgaatccgacgaattctacgatctgtgcgaccgcaacggcatcatggtctggcaggacttcatgcttgcctgcgccgcctatccggaagacgccgaaaccaaggccgaagtcgaagccgaagcccgtgagcatatcacccgtctgtccgagcacgccagcctgatcgtgtggaacggatccaacgagaactacgtggcctactccgaatggggcggctacaagcaggccctacgcgacgacgatctgccggccaacgagtacggttacggcgagaagccgtggggcgactactactatgccgagctgttcccggccctgttggccgagctcgatccgggccgttccgcctacctgccgagctcgccgatgagcttcaccaagttcgtgggcgccaatttcgacaccgacggcaccatgcacatctgggacgcttggaaccgcgccgactacaccgtgtatgcgcagtacaccccgcgcttcgccgacgagtttggctaccaggcaccgccggcgtggagcacgctcaccggtgccgtgcacgatgacgagttggagccgttcggcaagcagatgctggtgcaccagaaggcctccggcggcaactataagctggcccgaggcatgcgttcgcacatcactcccggccatctcgacgacgtgagcttcggtggcgtggtcaacggcaaaccgtccgacggcgagcacagctggctcattccgaccgacaactgggccgatatcgaggattggcactgggcatgccagttgcagcaggcgcaggccatgcgtttcggtgtggagcacatgcgctcccttgagccggtcaatgccggtgcgctgatctggcagctcaacgacgactggccggtcgtctcctgggcggcagtggatttcaacggtcagcgcaagccgctatggtacgcctcccgtgacttcttcgcaccgcgtctggctaccatccagccgcgcgtctccgaggaatatcgcgaaacccacagctgggaaggcgtcaggacggccaacgaccactatgagctgattgtgctcaacgacacccgcgaggcctggaagggctcttggaaggtggaacgcatgaccttggccggtgaagtgcttgcctcccagaccttcgatgtcgagcttgacgcggtttcgcatgtgggtctgccattggccgaggagatcgtggactacgccgacgccggcaacgagcttgttgtggccactgcgtccgacggcgccttcgcccgcgtgatcttcaacccggccgaagtcatcgggcagaagcttgccgcaccggctgaagcgtttgggaccgtggcatctcgcgtcgacggcggggtggagctcaaggtcaccgccacgagctacgtgcgcgacctgttctgcatggccgacaagattgacgccaaggccagcgtcgatgccggcatggtctcgttgctgccgggcgagagcgtcacgttgcgcatcgacaccggttccgacgacgatccgcagtctttcgccgcggccaacgtgttgcgtagcgccaatgatctgaagcgcgagtggtagtcgagcgcccatcggccgagatgacgtgaggattcaccgggtgatgattcgctgaacgttcagttgatggcgcttgttaagccgaagcataagtgaaagcgttgccgaccttaagcgattaaagtgttgcaaacacttagattcgtaggtctggcggcgcttttgctgtatgataactaaagaacagtttaagtaatcgcttaagttcaaagatgaagaaggatgcatcagcatggccgtgcagaaaagtaaggtgacgatttttgatgtcgccaaggcttccggagtctccagcagtgcggtctcgtatgcattgaacggcaaatccggggtttccgaggacacccgtgccaaagtgctgaaaatcgctcatgaactgggctggaagcccaatggggcggcgcaggcgctggccaaatccaaaacccagcgcatcggtctggtgctcggctacgatccgaaactgcttgcggtggaatcctacatgatggagctcatctccggtcttggcgccgagcttgaaaagcatgactactcgctgctggtgcgcatggccgtgggcgagcacgccaaactatccatcatcaaggactggatcgccacaggcaatgtggacgccatgctgctggtcaacatcgaattgggcgacccatgcgtgaccttgctcgaggagcacaccgagatgccggtgcttgccatcgcggacgcatccgtatccggcaatctaccgacgctgtcgagcgccgacgccgacgccgttcgtcaggcggtacagtatctgtatgaccttggccaccgccatatcgcacgcgtggccggcccggaaatgctcgcacattcctacatccgtgattccgctttctccgacgtggccaccgagttgggcatgcgataccgttgcctgcacaccgactacacgccggaaaccggttccgaggccaccaagaggctgctgtcgttcccggaacatcccacggccatcatctacgacaacgacgtgatggcgctgtccggcctcggtgtggcgacggccgaaggcattacggtgcccgatgacctgtcgatcatgtcctgggatgattccttcatgtgcaccgccgcctatccgaatctcaccgccatgggccgtgatgtggtgggcaccggtacgaaggccgccgagctgttgctcaagctcatcgacggtgagcgcgttggtaacgtcatggaagagccgtatgagttgcggcagcgcggcaccaccggcccggttcccgctgaacgatgacggtgtccgttcggtctaccttccggtggattcgcgtcggacgagccggaaatcggccgtgagcttttcgggcttgaaatccgtgccgtcctcgtcgatgcgcttgagcagcaggttgacggctttggccgccaaatcgttcagatcagtgctgacggtgcggaatcgtccgtcccgtctcgacccggccgctcctgactgacgcatcggtgtgaattgacgcgaatagtttgaaagaagaggttgcaatgactgaaatcgatgcccccgtttgtgctgtggaaacgtccgctcgaaccatcgatcggcatgatctgccgtatcgcgtgaacaacgtcgcacttgccaccaatccactgcatcgctattgcgccgacccgaatctggcaattttcgacggccgatactttctgtactgcaccgacgacggcgtcgatgactggggttccactgcgttcagcgtgtacgtttccgacaatctgatggattgggagcgttacccggcgctcgacctgcgcgacgtaccatggtggacgggttcggatggcgcgtgggcgccgtctatagtgcgtaacgccgacggacgatatgtgttgttgttcgtggctgattcgcagatcggcaccgccgtggccaacactccatatgggccgttcatccctactgttgaaccgattgtgcgcaaggggaccttcggctgccacaccatcgatccgggcgtattcatcgacgatgacggcacccgctattttttgtggggcaatggcaaggcgtggatcgcgccgttttccgacgacttcctgagcttcgacgaatccaaggcgatcggctggattccgggtgacttccgagaggcgatctgggtacacaggcatgacggtctgtattacgcgagctggtcggaaaacgacaccagggacccggcatactgcgtgaagtacgcggtagccgaatcgttggcggggccgtggagcgaaccccgcgtgctggtcgagcagaatcccgggcttcacttatacggcaccggccaccataacatcgtgaacattcccggcactgacgaatggattatcgcctatcatcgtttcgcctaccatccgtccggtcgatgggccggcggagatggatgccatcgtgagacggtgttcgccccgctcaatcatctgcccgacggcttgcttgagcaggtgcgccctcaggtcggttcctatgtgcgtccgttgggcattcggcccgccggctcggttccggctattccagcttgaaggccttgcgaatcatcagtatctgtagccagaatgagccgccgctcgccacgataatccacagcagcggcacccatatgatggcgcccggcacggtggccagcagtacgatcggcagaatgtcaagcgcgaacacggcgatggcgacgagcggcttgagcacggccagtttgaacgattgtctgatctgttcggtcacgcttagcttgctgcgaccggaaagcggcagtacgaacgccagcatcacgccgagaatcgcaaacaccgcgacggtgacgccgtagacgagcgagatggtgtcgccgccgtgttgcatcgacaggaacctcaagtcgaaggcggccagcgcccatactgtggcgatgatcagcgacagtgcgaaattcgtgccgatgcgtcgtctgaacgcggcgatatagccgcgaaagatgccgtgatcgcgtgcctcctgcatggtgcgcgccacctcgcatgcggcggaggtggagatgccgatggtgacgatcggaatcgatccgacgaaccaggcgaccgacagcatcgccagatcgccaatggtgctcatcaccacattgtacgggttgtcttcgcgaaagaaattcgatgccatgtcagtccttcggttgctgctgttgcgttatgcgctgctgttgcgttatgtacggcgtcatgcgattgcgatgcggtcgactgcctatcggtatagccagtcgatgaatcgctgcgcggtgccggtgttcttggtgccggttgcgatgccgatgagcgcgctgtggtcgctgtctgcgatgctcgtccaacctgccgcgtcggaaagcttcaatccgtaggatttcgacgcgcctttgccggtgccggacgagtcgattccgtcgtcgtctgcatcgctgaagcccttaagttgtacagttgcgtcatcgagcttggtattgtccgacttgctgacggtcgattcgagattggtgaggtatccgtagccggccagctgcttgaaaatcttatgcggggcgatgattacgtcgatttgcttgctggaaagcatggtctgcagcttggtcaggccgtctttgtccatatcgaaatagtcgtcgatgatcacgctaacgccgagcttgtcttccagctcgttttgcagattcgtggcttcgctggtggtcagtgcgtcgtcgacgacggccgcgtacaatgcggggcgtgcgtcaggggagataaagcgcaccgcgaggaacgtcaccaatgcgatgatgatcgcagccgttgcgacgggtatcagaaaatgctcgcgaaagtattccagcttcttgcgccaaggcagctggcggaagatggagagtttggattcgttggcgtatgccggagccgaggccagtgtgttgatggccttctgctgttcctcggtaagctgcgtgctcaatgccatgccgatcacccctttagcgccaatgctatcgtgcgttgcgtgcaatatgcgttgtggggcgccatgccgccacttgctctacttaagcgcttaatatatactggttttccgtaaaagtcaattatgctcattgcaagggttgacgtccttgccgtggaaaccacgtgaaacagcccaaggagacaacgatgtttgatcagggaccacatgttgtgctgcgtcgtgacggcgtatgcctcgtgctcaagaccccggaaggcgaaatgccgcaggtcgagtattggggaggggatttcggcattacgtccgatgaatccgcgctcaaccagcttgacgcgatgacgctgaaggtcactccgccacaggagaagccggatgccgcgctgcgcccgtcactgctgccgcaaggtgccgaggccttcgccggccgcccgggcctggaggcctatcgtggcggcaagccggtattcgtgcgttggacctccgtcaccgtctctccgatcgctgccggtggcgaaaccgaagccaacacgctgaacatcgtggccgaagacgccgtcaacgccgtcaaactggaactgaagctctccatcaagaagggtggcctggtactggtcgaacagaccgtcaccaacatcgacgcaaccgacaatccggatgccgccgcactgaccgtcaactggctggaatccaccctgccgatgccgcgtcgggccgacacccttacccagttcaccggtcgttggcctcttgagaagcagcctcgtaccgccgtgatgccgtccggttccgtgacccgtgaatgccgccacggcaagaccagccatgaaagcccgtggatgttcatcgtttccgatggcgagccgaagtggtcggaaggcgaagtctgggcctgccatctcgcatggagcggcaaccaaacctaccgcatcgacaacatgccgccgcacgagccgctcatcggcgctggcgaactgctcggaccgggtgagattcagttggccgccggcgaatcctatacggctccgcaagtgtgcttctcttactccgcaaacggccttgacggtatggcctcccgtttccatacgtggctgcgctccctgccgaagcatgtgtcgagtccgcgtccgttcacgctcaacacgtgggaggccgtgtactttaaccacgacgaatccacgctgaaaaagcttgccgaccgcgccgcagccgtgggcgtggaacgcttcgtgctcgacgacggctggttccatgagcgccgtgacgacaccaagggcctgggcgactgggtggtcgatccggaggtctggccgaatggtctcgacggcatcgcccagcatgtgcacgacctcggcatgcaattcggcctgtggttcgagccggaaatggtgaacctcgactccgattgcgcccgcgagcatcccgattggattctcgccgccccggaggccgtgccataccgcgaagacgtctcctaccgcacccagtatgtactcgatctggccaatccggacgcctaccgacatgtgcacgaccagatggcagcgctcgtcgaacagctcggtatcgactacatcaagtgggatcacaatcgtgatgtcaccgaaccggtgcatgacggccgctacggtctgcacgagcagaccctcgcctgctatcgattgttcgacgatctcaagaaggaattcccgaagctggaaatcgaaagctgctcttccggcggtgcgcgtaccgacgcgggcattctgcagcatgccgaccgcatctggggctccgattccaatgacccgcgcgaccgcgtggacatccagcgctacaccgagctcgttgtgccgccggaaatgatcggcgcgcatgtaggcccgtcgccggcgcactccacatggcgcgccaccgaactgagctaccgtgcggccatctcgcttgaaggctgctccggttttgaatggaacattctcgaatgctccgacgaagaggtcgaacagctcaaggcgttcgtgagcctgtataaggaactgcgtggcgtgttgcatcacggcaccgtgatgcacgccgacttcaaggatccggcgctgcgtggccgtggcgtggtttcggatgacggcaagcatgccgtgtgggtggtggccaccgtcaccaatctgcatgacgtgctcaccgagcgtctgcgcatgaagggcctcgatccgaaacgtacgtacggcgtacgtctgcgtgatgaggtcggcgaagtgcgctggggctggaataccccgcagtggatcaccgctgcgcagatgggcggcttcagggtctcgggccagctgcttgagcaggtcggtttgcagctgccgccgctgtggccgcttgaggcgatcgtgcttgaggtggaggcgctgtagtctggcgatgccgtcccgttgaacccaatggtggcgcgaaactcatgaatccctcccgtgtaatccaggagggattcatgattttcgcgccaccatcgaaaagggcgtcggattcatgagtttcgcgccatgactccatccccggcggtgcagtctcgctataccatgtggacgcgcctagtggtctgcctgagtaccggacgtgtaggcaatacctcatgggggtgttcgagtgttttcccgcgcatcagtgccagtgccttgatggcagcgcgtctgccgagttcgattggatcttgatggatggtagttagatcggcgatgtcggcgatattcgcatcgtcgaatcccagtactgacacatcctccggtacgcgtacttgctgcttgcgcaattccttgatgaggggaatcgcaaattcatccgtctcggccatgatgccggtgatgggagtcccgcaagacagtagctgtgccgtgagcttggggaatgtgtcggatggtgggtgaccgttctgatgcggctccgcagagaatatgcgacagtcatcatcggtgtagccaagtcgatgagcggccgcgatgaagctctccgtacgtgtactggtgctgtacagcatgtcggtagggatgcagtcatgtaggaaggcgattttgcggtgcccgagcgaatgcagcaactgtacgccctgcgccacggcgatattgtcatcgatggtgattgatgcgtcgaaaccctgtgtggatggcgaattgaggccgatgacaggcattccgctcgcggccagctgatcgtgcaactcttggctgaacaggaacgatgagacgatgatggcatcggcgttgcggttcttcggcagttcggcgaaatagcgttgcagttcggcgccattcatgatgaatgaaggcatcacatcgtagccttcgggtgccagtacgccatatacgccctgcagtgcggaggcattgaaccacgccttcaactcgccggacactaggaacagcacgcgcatggttttgccagtggcgagtgtggaggcgttgcgtgacagtgtgaaattcagctcatccgcagcggcggtcacacgttgccgggtgtgatctgacactcgtcctttaccgttgagtgcgcgtgaaaccgtcgattccgacactcctgcgagttgtgccacatcgctgatacttgctcgtgccataaaaacctccctgatgcgattgcaatcgcgtctgcccatgccggtttgcgtcatcgtttaccctatcgtattcattgcaggatgatggccaagcgcttttacatctactattacctgaaagctcaatgaaacacgctgaaggtaatgtagtttgcataaatattgcgcaagcgctagcataatagccaagcaaagaggcggtcagattgctgaagaagcatcagctacttctttgacataaaagataatatcaagcaaatcaagtgaaataactgtttgtggacagtggatgccaatgacaacgttgtgggcaaacgctgtcacttttgtaaggcggatggagagtcaatgaagaaattagaaaagttggtggcggtagccgtcgcggtggctatgggtatcggttttgctggctgcggcagcggcaattcggccgattccagtaagggccatgtctatttcatgaataataagtcagaaattgtcaatcagctgcaggatctcgcgcaaaagtacactgatgagactggcgtgcgagtcgacgtgcagactgccgcttccggaacctatgattccaccatggcgtctgagctggctaagtccaatgcaccgaccatgttcaacatttcgggctatgaccagtttgcgaagtataaagactacgtcgagccgttgcaggataccgaagtctacaaattgcttaatgatgagggcaaggcctactcctataaaattggcgacaattcctatacgctgccgtatgccgcggagtggtacggcatcatctacaacaaaaagatcgtcaagaattactgcaccaagagctatgcagttatcaaaacggccgatgacatcaaggattacaccaccttgaagaaggttgctgaaagtatgcagcagcacaaggatgatctcggacttgacggcgctttcgccacccctggcttagactcctccgactcctaccgcttcaccgcgcacatgggtcgtattccgctgtacttcgagtatcgagatatggataccacgttctctaaggacatcaaaggcacgtatctcgataactacaagaatttgttcgaccttgaactcaacaacagtccgaccgaggcgggcttggttagctccgcaacttacgacgattgcacctctgaattcgcgctaggcaaggttgctttttacccgaatggcgtgtgggcctacagccaaatcaaagataatgaagtggccgacgatgatcttggtatgttgccgtacttcatgggcattgatggcgaagatgattatggtcctgcaggtgtatatgacgccagttgggcagtgaacaagaacgcctccgagaaagacaagcaggccacgcttgctttcatcaagtggcttgtttccgacgatgacgccaaaaaggtgcttgcgaaggatatgggcttctcggtgccgttcagcacgttcgataccaatgatttccaaccggacaacccgctgacgaaggtggctcgcgcctacagtgacgaaggtaagaccgaaatccgcagcttcactgttccagatcagaagtggcaagacgacatcgcttcggcactgaccgaatacgcccagggtacgggcgactggagcaaggtcaagagtgcctatgtcgatggctggtccacagaatgggccagcaacgagtcttcgcttggcatgctgcccgaggccgagccccttgacgccaagtaaagcatgatgtgttggcgctgcggccagagtgaagccctcggctgcagcgcgggcgcccatcgcccataaccgaatactgacttctctctgcacaggcgggcggtgtttatcccctttggcaccgtccgctatttcttttgtaaagccgcagcgctgggttcctttcttcccggtgctgcggctttttcttgccagcgcatcgacctacccgtagcggcgctcaccccggttggtcttgggcagctgcttgaggtggaggcgctgtagtctggcgatgccgtcccgttgaacccaatggtggcgcgaaactcatgaatccctcccgcgtaatccaggagggattcatgagtttcgcgccaccatcgaaaaaggcgtcggattcatgattttcgcgccatgactccatccccggcggtgccaccccgcacctgtgtgagctggtaggcggcgaacagcacgatcagccagatgatgccggcgtacacggcgatgcgatagctggcggagaagcacatcagcaccacgaccagcgccatgaacgcaatcaccacatacggtgtcacgcgggcgagcggcagtttgaacacgatcctgtcgagcgcctcctggcccttcaggcccttgagttcggccgggccgtcgccggcagccactacgcggcggaacttcagctcggtgatcatgatcatcgtccagttgatggcggccgcgatggtggcgatcgacatcagatagttgaatgcgaattccggccatacgaacaccaccaccacggcgatggcgatgatgatggcggaggtgatcacgccgccgaccggcacgccacgtttgctgagcttgccgagatatgccggcgcgttgccctgcctcgccagcgagtagagcatgcgggaattggcgtacagacccgagttgtacacgctcatcacggcggtcaggcatacgaagttgaggattccggcggccgcgtgcacgcccacggaatcgaagatctgcacgaacgggctggagtcgccgtcgatcttgctccacggcaccacggccatgatcacaccgagcgccacgatgtagaacacgaggattcgccagatgatgccgttcgtggccttcgggatggtggtgcgcggattctcggtctcgcccgcggtgatgccgattagctcggtgccgccgaaactgaacatcaccacgaccagcgccatcatcaggccggtccaagtgccgtcggcgttacggctcatcaacccgtgcgggaggaagccgccgtcgatggtgaaccagttggcgaatgatgcacggatgcccgatgcggtcggcacgttcgcaatgatgacgtacaggccgccgaggatcatggcgatcacggccacgattttgatgatggcgaaccagaactcgaattcgccgaacttgtttacgcccatcaggttcagtgcggcgatggccacgaggaacacgaccgccgagatccatttcgggatgttcgggaaccagtagttcacgaacgaaccgactacggaaagttccaccatggccacgagtacgtagttgaaccagtagttccagccggagatgaatccggcgcgcttcgaccagtagcgggtggcgtagtagctgaatgcgcctgctttcggatcttctaccgccatctcgctcagcgcacgcacgatcaggaagatcgcgaggccgccgatcaggtaggcgagcagaatggacgggccggcgagtccgatggattcgctggaaccgtagaataggccggtgccgattgcaccgcccaatgcgatcagttggatgtgacgatttttcagtgacttgcgtagcgtcggcggaaccggcacgtcgtcggtttcgcgcggcttattcacggcattgacgtcgctcatgaatggcctcttcttctcttggctttggaacaccactgattgtatccaagcgcacacatatccgtacgtcaccgttcacggcgaaccagggttcttgtctgcggggcctgacggatgcggggggagaagatggagttcgtggcgccatgtgggtgtcgtgggtgccctatgcctacagcgaacggcaggatgatggccgtggtgtcagacggtcatgacgatggcgagcattgtggatccgaaacgctggaatcgtttccaaaagcatgtcctatgatggtaggaccggtatgcggttgccagcggtaccgctatggactcgatgaaggaaacgttcaggtaagggaatttacgatggggtggttccggtggcttctgacgaggcggcagggcgtataaggccaacgagaggtgggcagcgatcatggaacagcaggaaggcaagaccgtcgtcaccatacgtgatgtggcgcagcgcgccggcgtcgccgtttcgaccgcgtctcgtgccctgagtggcggctcggcgtccgaagcgacccggcggaaggttcaggaggctgccgaggcgctgcatttcgtgccgaatcctgcggcgaggcgtctgaccggtgggcatagcaacgtagtggcattggtggtggacgagcccacggacttcctgttccgtgatgacttcctggccggcattctcggccagttgagtatgtcgctcgctcgggagaacctgctgccgttcctgattctggccgagcccgataacgccaaggggttcgagcagctgctacatcgctccggcgctgaaggcgtggtggtggcgagttttcatgaaggccgtaagttcgccgatatgctcaaacggttcgataagcccaccgtgttcatcggcagtccgccgaagggcttcaaatgcccatatgtggatgtcgacaattacgacggtggttatcaggccggcaaattgctggtggaacgcggctgcaggcacattgcccttatcgaggggccgcgcgatatgcccacgccgaaggaacgtacggccggattccgtgccgcgttgaaggagcaggggcttgagccgatcacttcgtatgcgggtagttatgagatggataacggtctcaaatccatggagcggattattgccgagtatccgcaggtggatggtgttttcgcgcattccgacaagattgcggctggcgcgttgcatgtgcttgaccggttcgacaagcaggtgccgcaggatgtcgccgtcgtaggattcgacgatctgcaggccgcacgtctgctcaatccgcagttgacgacgctcgcccaaccgctggatgatatggcggaggcggctacgcgcatgcttgcgcatcgtttggaaaacggtacgtggcgcgtttcgttccagcgttttccagtgcgtctggtccgtcgcgaatccgcctgacggaagtgtttttcctgtcgtcgtacgtgccgtcttcatgttacgggaacggcgctgctgttgttgcatttcctgcagggatgagattctcacatcggtggctgaggtgcttgcaatgcgtgagattgcgtggcgcatgtcaaacgttatttggaaccgcttgcaaaatagtttagtgaattgacgatattcgttagtcgacgaaactatatcagggggcaagatagagtggcggtcaacatggtcgaatatgtctaaaagcattggaatatcagcgatttgtatcggcatgtgcaacacgccgagatgatggcgttaccccttgaaagggtgtatctttggagtcacttgatggaaacggttccatcaaacatgagaaaacatcgaagttttctcacaagatcgttgcacacagcagtgcaacgaacaagggagagtgacgtacatcgcagtgcgttgcaaggaaaagaggacgagatgaacaagttcaagccggcactggcatccgtcacggccctggccatgatcgttggcctaggtgcctgtggaagttccaatagttccagtgacagttcaagtgcggacggcaagatcaccatcaaggtgcagaccttcaacaatccgggtttcggcaagccgacttcggaacgcccgggtgcagacctctgggccaagtatgagaaggcccatccgaacgtcaagatcgaagagaccgcggccgcgtcttccgatgatgcgcgtgcagccttcaacaccgcaatttccaccggttccaacgcctatgacgtatacgtggccgaagttgactggatgccctcattgctcgccatgcccgacaagttcgttgatctgagctcctacaccaaagacaacgactgggtggcgtggaagtccgaaagcgctaccgtcgacggcaagttgatcggtgcgggtaccgacatcggccctgaaggcatctgctaccgcgcggacctgctcgagaaggcgggtttcccgtccgaccgtgaatccgtggccgaatggctcggcggcgatgatgccacttgggactccttcttcaaggcgggcaaggaatacaccgagaagaccggcttgccatggtatgactccatggccagtaattggcagtccatgatcaatcaggtcgaggaatcctacgtatccaaggacgacaagattattgccgccgacaatgccaagatcaaggatctgtacgaccagctgaccgccaccaaggatatgtccgcccatctgacccagtggagcgacgactggaacgcggcctttaagtccgacacgggcttcgccaccatccagtgcccggcatggctgatcaacaacatcaagggcaacaccggtgaggatttccaaggctgggatatcgccgacgtcttcccgggtggtggcggtaattggggcggctcctatctggtcgttccggaatcctccccggtcaaggacgaggccgccaagctcgtggcatggctgaccgaagccgatcagcaggtctccgtgttcaccactgccaacaactatccgagctccgaaggtgcgcaggcctcctccgatgtgtccagcaagaccgacgcctacctgaacgatgctccgacgggtaagatcttcgccaaccgagcgaaggcctacgacatcgtcccgtacaagggcagccagtacttcgacattcagaccaagatggtcgacgccctgaatcgcgtcgatgcgacccaggaacaaactcctgaccaggcttggaagcagtggttggaagacgtgaaggccctaagctgacagacatcccgtgaaggacccggtcccggccgaacccatcatccataggccgggtcgggtcctttcttctgagcgaatcgcgctcaacgcaaccggcatcttctgcaatcacaacgacgtgaactaggagcaatcatgtcacgatcaaccaagcagccgaccccatggcgcacccggctaggacagttcgaatggaaggcgtctccatacctctatatcgcgccgttcttcctgctgttcgcagtggtgggcctgttcccgctgctgttcaccgtatatatcgcaacgcgccaatacaacaccctgaccggcgatggcggcgtagccatctgcggcgcaacctgcaatagcgacgagcccagcatctgggccaacttcaactgggtactgcaccagcaatccttctgggacgcgctgcgcaattccttctccatcttcatcctcagctcggttccgcaaatcattctggcgctgttcctggcatggatcctcaacgcgaatctcaaagcgaaaaccttctggcgcatgggagtgctgttgccatacatcgtggcaccgagcgcggccggcatcatcttctcgcagatcttctccgacaagatgggtgccatcaacgtgctgctgaccgatatcggactgaaccccatcatgtggcacggcaacgccttctggtcgcatgtggccatcgccaccatcgtgaacttccgctggaccggctataacacgctgatcttcctcgccgccatgcaggccatcccgaacgacgtactcgaggcggccgtagtcgatggcgccggtaaatggcgcaccttccgttcggtggtgttgccgatgctgcggcccacattgatcttcgtgatcatcacctccaccatcggcggactgcagatcttcgacgagccacagatgttccacaacggcacttccgggtacggcggaccgaaccggcagtacctcacgctctcgctgtacctgtgggatatgggcttcaacaaggtcacgatcgggcagccgaacctaggtcgcgcagcggccgtggcgtggatcctgttcctgatcatcgtgctgttggccgtgctgaacttctggctgacgcaacgactcgcctcgggcggacagccgaagatcgacaaaatcaaactggccgaactcaacgcacggcaggaagccgaatatgagctggcaaagcgatcgggagtcgaggcccgtcgtgcagcctcggcaacggccgcttcgaccggcgccgccgaaaggaagtgacccaagatgaccgatatcaccaacgaaggcaacaagcgcgatctgggcactccggcacttgagcagatgtacggcaagggcgtggcccgttccgcagcgaaacaacgccgtcgtaagacgttggaagtgaccagcgaaggacgccgcgcagggtggggcacgtatgcgattctcgtcgtgacgatcctgattttcgtgttcccgctgtatgtggcgctttcgattgcgtcgcaaagcagctccagcacgcagtacggcgtgcaggcgctgattttcggcagcggactgatcaagaacatctcgcgcgcattcggcgccatgaaattctggcaggcgttgagcggcaccctgttcgtggcaatcgtcacgtcggtatcgacggtgttcttctccacgctggcaggctactcattctccaaactgcggtttcgcggccgtggcgtgctgttcaccatcgtgatcggtaccatgaccatcccgcagcagttgagcatcgtaccgctgtacatcatggccaacaaggccggattgttcggttcgatctgggccgtgatcattccgggtctggtcagcgcgttcggcgtgttctggatgacgcaatacctgcaggacgccctgccttacgagctgatcgaagcggcgcgcgtggacggctgttccatgttccgcaccttcatctccgtggcggtgcccgcagcccggccggcggccgcgatgctgttcctgtttacgttcatcgcgcagtggaccaactacttctggcccatgcttattctcggcccgaacaagaacagcatgctcaccgttgccgcggcaaccctgaagggcgcgtacttcaccgactacaccatcgtgatggccggcgtggtgctcaccaccttcccgctcatccttctcttcgccgtcgccggcaagcaactggtttccggcatcatggccggtgcggtgaagggctgatgcggatttggcctccgccgtcgggccatatacatgtacccttgtgacgagggtgccggctacaggggttgcgctcgctctggcgcaacccctgtttcatgcgtgtcgatgcgtgtcacagacatatgttctccagtttcgtagtgttcaataagaagtaggtttttcttaaggggcacgcgtctggaggagcacaatggcgttcgtcaaagacatgattcgcatgtggctgcggtcgtggaagcgattcgtctcgatcgccatgattaccctgctcggcgtggctgtactcaccggcatctacgcgggatgtcgcgatgcgttcctcgcatcggaccggttcttcgacgcccagggcatgcatgatattcaggtgttatcgacggctgggctgagcgatgccgatgtcaccgcgttgcgacgggtcactggcgtacggaaggtgcaagccgagcgctcgcaaagcgtaaccatcgatgtgggcggcgacaagtccgtaaccatgcaggaaatcggcacgaacggcatcgaccagccatacctgcaggaaggtcgcatgccgaccaaatccggtgaggtcgcagtcaccaagcaattcatcaaggattccggccatacgatcggcgaccgcatcaccgtcacacctgaagcatcccaagtgtccgattctggagaatcggacactcaggcaggtacatccggttcccagatgtccgattctggagaatcggacacttcagcggtgtcggatgaacagtcgccggaattcccgacggagctgcgaatcgtgggcgtggtgcttgatcctcagaacctgagcaatcctgacggatattcggccatgacctcgttccgttcgactgcgacgagcgattacacgtttttcgcgccatccgatggcgtgaccggcaccacctatacgtcggtcactctgctggtcgacggtgcggcagacgaaagcacgttcgacgaatcctacgaaaccatcgtcggcaaagtcatgaaccgcatcaaaggcaaaacgaaaaccaatcgtcagaaagcacgacggcaggaactcatcgatgcgggacagaagaaaatcgacgaagcgcgagacaaagccaatcggcaattcgcggatgcgcagaaacagatagacgagaatcgcagtcaattcaatcaacagatcgatcagattgtggcacagcaaagcgcaatgctgggcacaggtgcgaccatggacgaatccacccgtgaaaccatgcgtgaaacagtgatctccagcagtccgcagctccaggaagccaaggcgcaattggacgcggcgcaatcgcaattggacgagcagaggaacagtgccgaacaaaccttccaggataaggaagatgagctcgaaagcagcgtgccgaacgtgcgctggtacgtgcaggatcgttcatccctcggcggatacagtgcgctcaaatccgacctgagttcgatccgatccatcggcaacgcattcccggtcgtgtttctactggtcgcggtgatgatgagcctgaccgccatggcgcgcatggtcgaagaggaccgtggccttatcggcacctacatcggcctcggttacggacgattgcaggtcgccgcacgctacatgctgttcgcactgcttgcctgcctgattggcggcggccttgggctattgcttggattccttggcattccagcgtttttgctgattgtgatacaaggcatgtatgtgctgccgggcgtgcgattcgagtatgactggctgtacggatcgcttggtatcgcgctgttcgtggtcggcgtactcggtgcgacgatctacgcgtgcgtcgaagagatgcggcagacgcccgccggcttgatgcgtccgaaagccccgcgcgcaggttcgcgcattctattggagcggattacgccgatttggagtcgtttgggattcctaagcaaggttactgcgcgcaatatcttccgtttcaagtcgcgcctggtcatgacggtcggaggcgttgccggatgcacggcgttgatcatatgtgggcttgcgatcaacgacaccgtggcggaacttggcgtcaaacagtatcgcgatatctaccgatacgatgtgatggtcgttgcgaacgataccgatgcggatgcaatgcgggcgaagttgcgagcggacgggcgtacgacttcgaccatggacatacgtgtcgaatccggtgatctggcgaacgatgagggaagcgagggcatccaacttgtggtggtgcccgaggagcatctggatgaactgggcgagatggttacgctcaagccggtcgcgtccggatgggatggtgtgcgcaagttcttcggactgtccgattctggagaatcggacagtaaagcagtcgaaaccacgttgcgaatgtccgattctggtgaatcggacaaacagggtggcgaatccgaggcacggatggctgattctggagaatcggacagtcaggacgtcaaaaccggggcgcagttgtccgattctggagaatcggacaaacgaagcggctcgaaggcggtgttgggcgacagtggggtgatcgtgtcgcagtcggcggccaacgctctgggcgttaaggccggcgatacggtgaatctcaccaacggcgatggcattcaggccaaggccaaggtgagcgaggtgacgcgtaacctcataggttccgacatctacgtgagtgaatcgtattatggcaagctgttcggttcagggtccggaatgtccgattctccagaatcggacaaatcggattccggcggctccctgacctggaacgccgtatacgccaagctcaccggatccgacgatgcgcagatcgcatacgccaacaccctcgaaaaggatgattcggtgatgaagacggtgtgctgcgcggacatggccgccagcttcaaatttgacctcatgggcgcggtggtcgccctgatcgttgcgcttgcgggcggtctggcgcttgtggtgctgttcacgcttgccaatacgaatgtgtcggaacgcgtgcgcgagatggccacgttaaaagtgctgggattcttcgatcgcgaagtgcatcggtatgtgaatcgagagatgatgattctgacggccatgggagtggtgatcggtttgccgataggtcgatgggtcggtggtctgctcacggctgcgctgaatatgccggcattgtatttcgaggtggaggtcaagccgatgagttacgtgattgcggcggcggcgaccatggcgtttgcgctgttggtgcaactgttcgtgaatccggtgcttgaccggatcgagccggtcagttcgttgaagtcggtggagtaatacgactcaggggagcataccccgccattttcctcctttctcatgtgtgtcacgtgttgtgtggctcatgaaaccattgaagatacgggggtgtatggagcgtgtgtttggcgtgaggccgcacgcttcggttggcgtgtcttgactgttgtgcccgagtgttgcgggtttcagccgtgtgactcgttttcgtggggtttgcccgcattgattcgttccgctgtaagcaaggtgcggtgccgtgaatgttgagagcggcgagaatattatgcgggggtcgtagggagggtatcggaacaaatccccccgatacgattcggcgtatcgcagttatatgagggggtcgccatatgaaaatactttcgctggggggggggggcttcttttctgcccacatgcaatttacaggcgatcttgcggggcttgcgatgatgccggaccgtacgatgacgctcgagcaggggcggcaatgatgatcgacggtaagttcactgccaaggaacgctcctatctggccagtctgcccgcggtcaaaagcgtcagtgcatcccatattcgctataccgaccaattccgtgtcgaatgcatgtgccgttaccgtgcgggggagtcgcctgcggctatcttccgtgaggcaggtcttgatccgaaacttatcgggtacaagcgcgtggaacgttgcatcgccagatggaaacgtcggcaagataaggaggcgaagtccggtaagcggacgagtccgtatgcgctcgatgccgatgatttgcggatattggaacacggcaatcttacgcaatcggaatgggggtcgccgaatgccggcgattccgaggaggggctgtcgcagctggcgagggctcagctggccatcaatgagcgtgatctgctgattgcgcggcaggcgttgcgcatcgacgaactggagcgtgtattgcggcagttcgtcgaaaggtagcgggattgccgaaatgctgcagtcaacagcgttcgggctggatttggcgggatcggagagtcgctaatgcgggagtcacggtgcgaaacggtgcgtgctgaggatttgatggaaccggaaacggcgggaatgggctggcggcagcctgcgtttgatgaggtgatcgacgttgccgatgagatgcgtgaacgccgcaggaatcgccgtagtatgcgcatgatgtatgcgattggtgcgttgctgatcgtcgccgcaatctgcattggtgggtttccggcggcattgcagtaccgtgccgcagtggagttgtcgcgtacgtcggcgcaatccgcacgaacgattgcgggctggccgtatccgcaggcggatgatgcgttcgctgccgcgaaatcatacaacgaacgtcttgcggtttcggggcaaccgattttgggtgaggcgaaggatccgttcgctgcggttcagggcggttcgcgggccagcgagacggatgatgacgatggcagtgcgagttccaaagacgaggaatatcagggattgttggattccggtggcggagtgatgggcaccattcgcattcctaagatttcggtgaacctgccaatctaccacggcacgtcgcagtcggcgctggcctccggcgcggggcatctgtacggcagcagcctgccggtcggtggcaagagcacgcatgccgtgatcaccgggcatcgcggattggtgaacgccaccatgttcacgcggctcgacgagatgcgtgttggcgactacttctatcttgacgtgatgggtcatacgctcggctatcaggtggaccgcatttccgtgatcgaaccgaacgatacgtcaaagctgaagatcgtgcccggcgaggatcgcgtgacgctgatgacatgcacgccatacggcgtgaacacccaccgtctgctggtttccgcggtacgctcgtcgattcccgacgtgattcccgacgaatcggacgcggcgaaggatgcgcggttgattgcgatcgtggccgctgtaatcacattgctgctcggattggttctgttgtggttgcgcagaaagccgtggcatattcgcaggcatgcggccaaatggccaaaaaggggatagattcctgtttcgaaaatcgggtgccgaaaacaaccttcatgcgttgcagccagtaggttttgccgtgaatctttcccctcgactttcccgccgttagggtgtatgtgtgcttgggtgaattcccctacgtttcagggttggagcggtgtcgaacgactgcaaggtcgtcgaagccgtatgaagacaacctagcgccgcaaggcgctgcgtaaggggacaatatgaaacgtgcatgcgacgaatggcaggcagtgcgcaaagggggacttgctaagcgagtcatcgcggcgcttgttgctgtggccatgctcggtggtcttggatatgccactgccagcaccgctgttgcgcaggatgatacgacgcagcagcaggcgcagcagacggagcagtctgtgaagaccacaagcgaatcgcaggatgagaagacttccgattccgaagcaaccagcaagaaggccgctgcggatgagacctctgcggatggttccgctgaggatacgaatacaacggatgccgatgctggtgttgaagcgcagaatggcgctgatgaaacggcagtgcaagcggctaatgagccggccgcgactccggtggcggacggtggttcgccggaaagcggttcgctgctgctggacgaatcgttcaagaacagcgccttcggagacgcaaactggacaactgcagacagcgcttgcctgacggccgcgaccagtggttcgttgaagtgcgagaacacgcaggatagcagtgatacccaaggggagaacggcaagggttacctgcagttgacagataacagcgagaaccaaaaagccgcagtactgtacaatcagccggtcatcagcaagagcggcctgcatgttacgttcgactattacatgtatcagacgtccggcgcgggcaagtatacaacaccagcggacggcatcagctttttcctgacggatggcgcgaccacgctgagcaaggcaggcacctcaggcgcggcactcggttacgcgactagtgacgatgatggcatcggcaacaacagcaagcgaggagagggtgtcgcccaaggtgtgctcggcatcggctttgaccgtttcggcaacttcagccagcagaacgcaaccggaacggagtccgataagggttatgcacgtgttaccggtggcgaggactgcggccagtggagtgacccgaagggggccaactccgttaccgtgcgtggtgcgggaaagaccgacagcgacggtaactggaataatggttactgcattgtggcatccgagaacgttgaggccggacttgacagtggcaaggcgaccaagagcgaagacgataccaatggcaaatccgttgacatcaccatcgctcctgttaccgatgacagcgccacgacgcagcatctgacggtgaagatcgcaggtaagaccgttctcgaaaaggatatcgaccgtcttccggattcggtgaagttcggcttcagcgcatccacaggtgctgaccatcaggtgcagttgattcgcggactgaaggtttactcggtaaacaagctaagccagcttgatctggtgaagtccgtggacaaagaccagtacccggatgcggattcccatacgttcaatgtgggcgatgaggttccatatacgttcgtagtgcgtaacagcggcaccaccacgttgaacaatgttgcggtgaatgaccccaacatcacgaatgtttcctgcgggaccggcactcttgccgcaaaccagcagacgacgtgctctggaacgttgacccttaccgaagacatggtgggcagcgaaggccacttcacgaacaccgccacggctacgggtacggacgacgagggcaatgcggtgaattctcctcaagccagtgtgacgattaaggcgattaagccgctcggcgcaccggagaagcataagaggatcaagaagaacagcgacaagaactacacggtgaacgtcgacgtgaccggtgccgcgaacagctccacaatcacatctacccagccggtcgacttcacgctcgtgcttgatgtgtccggttcgatgagtgaggcgatagacgaccaaagttctatcagcaaaatggcagcattgaagtccgctgtaaacaacttcctgggtgaggctgcggaaattaatgagcaatccggttctgagctaattcgtgtcggcttggtgaagtttgccggtaaggaatcgagcaaagtgggggatgagacatatacggagggaaggtttgtttacaactactcccagattgtaagccccctaaccgctgatatgagcgacttgaagaataaagtgtcagcgcttaggcacaacggtgccactcgggctgatcttggattcaagcatgcgtccactgtaatgcgcgatgctcgatctgacgcaaagcaggttgtcatcttctttacggatggtactcctacaaaggtggacaattttgatgcggacgtagccgatgatgctattgcctacgccaacagtatgaaagataacggcgttatcgtgtattccattggcgtttttgacagtgcgaatccagcctcgacggagagtcgggaaaaccaattcatgcacgctgtatccagcaattacccaaatgcgacgacatacacgaatcgtggcgaggggagtaacgccggatactacaaggccgcaaccaatgcctcggatctgaactccatctttgaggaaatccagaagagcgagacgaccactcacggtttcaccaacgtgagcatcgaagatacgctttccgaatacgtcgaactctccgacaagaactatacggtgacggcgaaggatgccaatggcaacgaggtcactctcaaaaagggtagtgactacacgctgacctatgacgaatccgccaagaagttcacggtcgtattccagaacatgttgcaagatggtgttacctacacgctctcctacaacgtgaagccgacccagaaggcgtacgatgagtatgcgctcaatgacggctacgatggcactgtaggtgatgcagataccgatctcgacggcggcgctacatcctccgggaagcccggtttccactcaaatgaatctgcttgcctggcttatacggccaacaatgtggcccacacatgctccgacaatccatacccgcatcctgtgattcaggtgctctcctccaccatggagatcaaaaagatatggaagggcagtggcaacaaaccggaaagcatcactgtggagatcaagtgtggcgacgaactctacaagaccgtcgagttgaatgccaataacaattggaccgctaaagtggcgattcctctcggtaagaagaagacctacaccgttacggaaactaacctgagcgattcatggaaaccagactatcagtacaaaatcaaaggtgacgattattacagcgaaggcaacgtggtaccagttcgcgactcgccggatccgaggacggtgtatgtggacattaccaaccgctctatctccgtggccacgctgccgtttaccggtagtacgacggaacgtcagtggctgttgaccgcgggcgtcatcgcggcgctgtccatgctgatggtcggcgcggccggaatctggcgcggcaggaaacgcctcgtctgacattcggtcgaaatccggccaagtcgggccgtcccaacagcgcggatggcccgacggaacacatcaagatttacggatttttgggatatgttgggcccattttttcgtgattaaaaacccaacagcaatagaaaaaaggaagaggggctaactcatgaagatgaggaaacttttcgccggcatcgccgccgcggcgacgctgctgggtggtctggctgtaggcgctaccagcgcttcggcggaagagaccatcgttaacgacgaagccacgttcacgtttaccgccgatagcgcggagcagctgaagaacgccaatctggttgcctacaagatcggtgactacgttcagtacggcacgactgggacttatagtgtgaccacgaacgaggccaataagactgccgttgacaacgctctggagaaggctggcatcgcagtcgaggatggccaagataacctggccgccgcgctgaacgaaggcaagcttgatatctccgctactcgcccgtgggacaccactgcggagggtgtggccagcacttctcgtgctttcgccaacgctcttgctggagaggatctgcaggcaggcaaggcgattggtaccctggagccgaccggttccgatgaggacggctataaggctaccgtcacgctcactgcgggcatttatctgtttctggacgccaatacttctaccatcgacaaggtcaccgtggccattccgatgattgttgcttctggtactgtgagcggcgatgcgctgactgatccggtgaacggcgataacaccgtcaacatgaagaacaccaagagtactgatcagaagaaggaagtcgacaaggcatacgcagccattggcgacaccctgacctacaccctgaccggtgctatttccaacccggctccgactgccttcgcattcaccgataccccgggcgttggcctgaccgtcaaggctggaacctacaagttctacacggttggagctgatggagacatcgaggatccgtccaccgatttcaccttccctgaagtggatgtgaagggcgacggcaatacttccttcgacgtcaccgtgaacaatccatccaagtacgttggccagaccatcaaggtcgagttccaggctctggtgaatgacgaagccgttgtcgaagatggcgtcgtaaacgagctttacaactacggcgagccgattaaggtcaccaccaagctcggtagcttcgacttcacgaagatcgattccgataacaagggcatcgaaggcgctgagttccaggttctggatggtgtcgaagtgctgtacttcgtcaagcaggatgacggctcctacaagaaggccgcttccaaggacaccgaaggtgccactgataccctcgtgtccgccgctgatggcaccgtgaaggtcaccggtgttgatgcctcggcatcgaaggcctacaccgtgaaggaaaccaaggttgctaccggaaagtacctggatctcaagccgacgttctatgtctacttcaacaatgaccacgaggcaggtctcagcacgactaggacctctgatccgtggggcctggtcaacaccaccgacaagaccgtgaagaacgtgaagtccgtcgatcagctgccgctcaccggtgctgccggaaccatcctgttcaccgtcatggctctgctgctggccggtgccggcgcgaccgtggtgctcaaggctcgttccaagaacgccaaggcttgattctcatcagactgaatcgataggctgaaccctcgaagggtgactgcgagaacatcatcgcagtcacccttcgtttgttgggataagaagggttttgagacgcgaaagcctctcatgggcgatgctctttttcgggggttatagagtgcgatctacgggggctcgggtcggtgaaatggcgagggtatgcggaaggaaggttttacgggggttgacggggaggggaggaaaacgagggtattgtgcggaaagcgagccatacaatcgctagcgaattcaccaaacagatatgtgaagggcaatgcagcgagaaaggcggaacgacgatggcacggggcggcggatcgttcagtagcgaggaaatccaactattgcgaggattgccggcggtcgccaacgtcacgcaggatcgcatcacctactccgataccttcaaacaggtatgcaccattcgttacctggcgggggagtcgccgactaaaatctttcgagaagcgggcctgccaccggacctcgtcggctacaagcgcatcgaacgcagcgtggcgcgctggaaggcggccgccatcaaatccgtgaacggcagcgacagcatgagcgatggtgagatcatcgctcagctcgttgatcggtacaggcgtgcgctggtaacacggaagaatcttgacagcattgcggagaacatcatcggcatggaatccgatgcgagcgtggccgccaccaatgccgaagcctccttgaaagccatgcagccatccagtccacagactgccgatacggggacggacgcgatcgatgccgagacggccagcatcatcatcaaacagcaagccaggcgcatcgacgaattggagagagccaatgaagcgctccgcgaacaggccgcgcacgtcgcctaagtcttggttgcgcacgtcgcctcaattcgcgagtgtacgcgagtgcagtcggtggaatgcgtaacggaacccgaaacgcatgaatctcacgccccgagtaaaccgggcatgcgataagtaagcagtgggcagaattcggcagcccgcctaattgcgggacggatgtgcgatgcgcggggtagggtggaaatcattatgacttacgagaatccgaactccgccggccagggcggtatgcaatccgaaacctcgcctgccgacatgcgagctgcccaggccgcgacgccggcaaccgccgaacccgtcgagtcgctcgataaaggcaacgagatggcccgaggcctcaacaatcgccatgtgcagttcatcgccatcggcggcaccatcggcacagggctgttcctcggttccggcaagtcgatcgcactgaccggtccgagcatcatcttcgtgtacatcggcgtcggcctgatcatgttcctgctgatgcgcgccatcggcgaaatgatgtaccgcgaccccagccagcacaccttcatcaacttcatcacccgctatctcggccgcggatggggcaaattcgccggctggacgtactggatcgtgctcatcctgaccggcatgaccgaaatcacagccgtcagcacgtatttcgtcacgttcttcggcatgttcgacatcaatctcaaagcatggaaatggctgatcgaactgtgcttcctcgtggcgctcacatgcgtcaacctgattgccgtgaaagtgttcggcgaagcggaattctggttctccatgatcaagatcacgctgattgtgggcctgatcgccaccgccgtggtgatgctcgtcatcggcttccactacccggccacgcacatcgagggcgttgacggcaccattgcgggcgcgacggtgagtctgcgcaatctggtcaacggcttccagatcgcgccaaacggttggatgagcttcttcatgagcttccaaatggtgttcttcgcctacctgctcatcgaattcgtgggcgttacggtgtcggaaacgcagaatccgcgcaaggtgctgccgaaagccgtgaacgaaatcatcatgcgcattctgatcttctacgtgggcgcgttggtggccatcatgtgcattgtgccgtggcgtaatttccatcagaacgccgacggctcgttcggctcgccgttcatcatggtgttcaagtatgccggccttgactgggccgctgcgctcgtgttcttcgtggtgatcaccgcggccgcctcgtcgttgaattcgctgctgtattcggccggtcgtcacctgtatcagctggcgcaagattccgactcgcctgcgatgtcgcgcttggcggaagtgtcggaccgcaaggtgcccgcgaaggcgatcgtggtgtccggctgtatgatcctgttgtcaccgatcatcaacgcgctgcccggcatctccagcgcattcgtgctgttctcatcggccgccagcgccgtggtgatcttcatctacgtgctgacgatgttcgcgcaccgcggctaccggaagagcgccgactttcttgccgacggcttcctgatgccggcttggaaggtgacggattggattgcgatcgcgttcttcgtgttcgtatacggcacgttgttcctgtcggccgacaccatcggctccgcgattgccggtgtggtctggttggtggcgttcggcggctactgtctgttgcatgaacgctaccagaaccgtgatctgaaggactcgttgcgtaaatgaaggtgcggtgggcggaaaccggctgaaatgcacagaaaccggtctaaatacacggaaaccggctgattttccacactatatgctgggaatcagccggtttttgctagatatatggggctatgcgacggttatatgacggttatgcgcgtcagccgatatagtcggcttcgttcgtcgggctggacggcacggcgtggtcttccgtaaccttgcccaagccggacagatatgcctcacggccggcttcaatcgccttcttgaaggcgcgggccatcagcggaatgttgccggcggaggcgatcgcagtgtacgccatcaccgcgtcggcgcccatttccatggcttccgcggcctgactcggccggccgatgccggcgtcgataatcaccggaacattggcattcctgataatcacttcgatgaagtcgcgtgcacgcaggcccttgttcgagccgatcatcgcgccgagcggcatcacacaggcggcaccggcatcttcgaggcgtttggctgcgatcggatcggggaacatgtacggcatgaccacgaaaccttccttggcgagcatcgccgtggccttgatggtctcctcgttatcgggcagcagatacttcgcctcgtgttcgatctccaccttcacgaagtccgtctggcacacctcgcgcgccaagcgggcgatgcgtaccgcctcctcggcattgcgcgcgcccgacgtgttcggcagcatggtgatccctttgggaatgtagtcgagcaggttgttttcggtggtacggcaacggcgcaacgccatggtgacgatctgcgtgccggcgttctcgatcgtggccttgatgaggttcagatcgtaacggccggagccgagaatgaatcggctggtgaactcatgtccgccgagaatcagggggtctgcgctgccggtggcgatttcgtcgtatgcgtgcgcatccggttccggcagaatcgcggtattcgtggtggtgccgaccagctcgtcgagcgtggcgttcggcgcggtcgcaaaatccttttcggctgtggttacggtgttttcggtactcatcgtcgggtcctttcggttgattgagtttgcttaggcgtcttcttcgccgagaatcaggcgggtgatcatattcgcttcatggcaggcgaccacgcccacgcgcggagccatcaggccggcacccggtaccggggcggtttcgccgtcgccgcagaagtagaaattctttgagacgcgtcgtgtgctcaccagattggaactgcggaatccggccatgccggaggcgctcacgagcttcttgcttggcaggttctccagtaccgcgttgaccagcatggttttgttctccggcacgtcaaacgcctcgcagatgatgtcttcgtgttcgaagagcgtcggcacgttctcatcggtcaccttgacggtgtcgacggtgatgtcgatgaacggattgatctggcgcaggttgctgcgcagcgcctcagttttgtactggccgagatccttaaggaaatactgttggcgattgaggttcgtcatgtctacgcggtcgaagtcaatcagatgcaggtggccgacgccgatgcgggtgagcgccacggcgatcgtcgagccgaggccgccgcaaccgcagatggccacgcgtgcggcatccagtttatcttgggtggccgcggtatggcggtcgagcagggcggcgcggatctcctcgcgacttacgagcgttgccggatcggggaggttgttgaatgcggtttggcgtgcttcgatttgttcgggggttgcggatggttcaaaggtcatggtcgtgtcttgtttccgttcgtttgcgtgttattgggtgcgggcgtgcgcggcccggcatgtaccgtgtccgccgcatacaggcggattccgtggaacgttcgcggcggtcccggttctccggtgtgattggccgagcctcacgtttgactcaggcgtgcctgttcgcgactcgcttggtgtgggttcagccgccctgtacgaaggtgacgatttccaaggtgtcggtgcctttgagttgggtctgtgcacgcagtgcgcgcggcacgatttcgccattgagttcgacggccacacgttcggcacgcagtccgcgctgctcgatcagttcggccacggtgatcggcgtggcgatgtgctcttccttgccattgatgatcatgttcgatcccttctgttgtgcgattcggaaccgttggcatgcaacggaatccaccgccgtgccgcaaccttgccattcgcgtggatgtccgattctggtgaatcggacactcgtggcgcccgtagattgtccggaatgtctgattctgacgaatcggacatccacgaaacctgcaggctgtaccggcgggcggcgcgttgatgggattccgtaccgaggttccgatacgaaaaaagggtctccgaaggaaccgtaccctgtgaggtggtgcgcccctccgtgaccctgattcacgcgatattcggttatcgcgaacggaagattgagatgcgccttgcagcgcgaacaacccgtctccttacggcggcattacccgcatcaagtcctcggtcgaagtcttgcgactccctctcagcctttcggctcccgttcggttgtgcccctatcttccctcagccgtccgacaagatcgtcggaatcaggtgatggattggcgcactatctgaagattcgcctctgagttgcgagagtcggcctgttgctcgacggtggcgtccttaagtccgtgtggctcgggttctggactgcgagaatcggcctgttgcccaacgacggcgccctcgagtccgtgtgtttggggttgcaaaccgcgagaatcgctccgttcctcaacggtaggagccgttcccagaccgatttgaggccgtcaccgtcgagcaacaggccgattctcgcggcgtatgccccatgactgctgccctaaggattcccgagccagtcggagggtatgtgagaatgaaatcagggtacgagaaggagatggcgttgaaggattcagcaacggacgcagtgccaggtgcagtgatgggcgaactggcaggatttacgattcctcggcttggcatgggaacgatggcgctggcgatcgagggccggccggatcgtgacacggcaatccacgcgattcatgccggtctgaatgccggcgtgcgatatctggataccgcatggtcgtactatctgccgagccggcccggtaccggaaccccggaggatctgggctatggcgagaaactggtgcgtgatgcgttggcgacctgggatggtccgtgcgacgaagtgcttgtcgccacgaagaccggttaccgtcgcacgatggagtcttccgtgcgagtgtccgattcaccagaatcggacactgacgatccggcagccccgcgtgcatattccgcggtacgcgatgacgattccgtaacacctgctatgcggtccgaccgatctgcggaacgtcagcatctgcaggccgttggcagtcgatacggttggatggcggattcgcggcccgaaacgatgattcgcgatgcgaaggagtcggccatgcgcctcggtgtggaggcgctcgatttgctgtattcgcatggtccggatcctgcggtggattatgcggatcagatcggtgcgctcaagcgactgcttgacgagggggtgatcaggaacgccggcatctcgcgcgtgaacaacgagcagattgacctcgcccgtgagattttgggagatggcttggttgccgtgcagaatcagttctcaccgtcataccccgaccccgaacatacgctggaacactgtgagaagctaggtcttgcgttcgtctgttggtcgccattggggggattcctcgatgcgttcgaccaacgcgcgtacgatgcgttccgcgtgattgccgataagcgtggatgctcctaccagcgtgtggtattggcttgggagttgagtcgctacgaccggctgttcaccatcccgagtgcccgcaatccgcatgagattcaggattcgttcgccgctaccgaacttacgcttgccgatgaggagcttggattcctgaatagctagtctccaacggaccgcgcgctgtcaccttacgtggggagatgcaacggttcgcggtgagcgaggacggattgcgccgtgtgcggcacgcgtagcgtgatcaggagataaacagtttgcagtgtaagataaaatatcggttgatcatacgggaaggagggtacgcgtgggctatgaacaggaagcgttccgcaagttgatgtcgaatatctggggcaagaaatcccggatgcaggaggagatgtcaaaaggcgcgaaaggtgagccgttcatcgtgcaggagctctcgcggaaaggtccgcagacgccgacgcagctggccgcggcgatgcgtgccactaccggcagggtctccacgttgctgtccgcgttggaaaagaaggggcagattacgcgcgaaatcgacccgaatgatcgcagaatcgtgcatgtgagtcttaccgaagcaggcgaacggcgtgccgaaaagcagcgtgaggacatgcgggaggcggtctgctggatcttttcgcagatgggtgaacggcgcacccgtgagttcgtggacctcgccgtcgaatttaccacctacatgtccttgtgcatgccgggcaagtcacgccccactccggagcaggtcaggcaggccttcggctcgacaggtggctccgacggcgcagcaagctgacggcgtgcgcgggccatcccggcacgggcaatccgtgacgatatcgtggagccgttgtggcaataccgtggcgggtggcagtgtgtgccgatcgttcgcggatgcgccgcaaccaacagcggcaaaccatgcaatcgcaaatcgctctcagggaatacacagaaacgggcgtaatatcttacactgtaagtaattgacatcgtaaagtaatcaccacagagaaggaaccgagcatgcttcgcatcatgcgatacctctccaaagcggagataggccagatgctcatagcgttggtcagcatcatcggtcagatctggcttgatctgaccctgccggactacatgtccaacatcaccgaactcgttgaaactccgggcagcagcatgtccgacatctgggtggccggcggcaaaatgctcgccatctcactgggatccgcggcctgcgccgtcgtgaccggctacatcgccgcacgcgtgggcgcctcattcagccaaaggctacgctcgctggagttcaacaaggtcgaaagcttcggaccggcggaaatgaaccgtttctccaccgcgtcgctcatcacccgctccacgaacgacattacgcagatccagatgttcatcaccatgggcctgatgatgatcgtcaagtcgccgatcatggccgtgtgggcagtatgcaagattgcgggcgacggattcgaatggacgctcgccactggcatcgccgtggcggtactgttggtcgcgatcggcattctgatggcgctggtcatgccgaaattcaagtccatgcagcgtctgacggacaacatcaacctggtggcgcgcgaaaacctgaccggcctgcgcgtggtgcgcgcctacaacgccgaagactatcaggaatcgaaattcacgcaggccaacaaggaactgaccgaaacccagctgttcaccaaccgtgccatggcggtcatgatgccgctgatgaacaccatcatgaacggcctgatgctcgccgtctactggatcggcgcatacctgatcgaagcggccgacgccaccgacaaactcaccaccttcgcgaacatggtggtgttctccagctattccgtgcaggtgatcatgagcttcctgctgatgagcatggtattcgtgctgtggccgcgcgccgacgtatccgcacagcgcgtgcttgaagtgatcgacaccgagccgatggtcgtagatggcagccggactgcgggaaagtccggcatggaaggcgacatcgaattccgcaacgtgagcttcgcctacccggattcgcgcgaggccatgctggaaggcatcagcttcaaagccgcaaaaggtcagacggtcgcgttcatcggctcgacaggctccggcaaatcgtcgctgatcaatctggtgccgcgcttctacgacgccacccagggcgaagtgctcgtcgacggcgtgaacgtgcgcgactacacgctcaaggcattgcgcgacaagatcggctacgtgccgcaacaggcgttcctgttcaagggcaccatcgccggcaatgtggcatacggcgacaccgaactgcgcgaacgggacgtgaaggacgcctgcgatgtcgcgcaggccacggaattcatcgacaagaaggagcatggctacgaatccgacatttcgcaaggcggcgccaacgtgtccggcgggcagaagcaacgactgtcaatcgcaagggccgtgtatcggcatccggaaatcctcatcttcgacgactccttctccgcacttgacttcaaaacggaccgtgccgtacgcgacgcgctcgcgaaggaggccaaggattccacgaaactgatcgtcgcgcagcgcatcggcaccatcatggatgccgaccgcatcgtcgtgctcgacgaaggcagggtggtcggacagggcacgcaccgtgaactgctcgagacctgcgatgtgtatcggcagatcgcgcagtcgcagctgagcgaagacgaactgaagggaggccgctgacatgcctaggggaccaatgggacgtggacctgctgaaaaaccgaaggatttcggcggtgtgatgaagaaactcatacgtttctgccgccgctacattcccgtgatcatcatcgcgctggtgcttggcgcagccggaaccgtatgccagatcatcgggcccgacaaactcaaggacatgaccaacgagatcaccaagggcctgccggccatcgtacacggcaagccggtgatgaactcgatcgacttcaccgcggtcggccgtatcgcatggctgctggtggcgttgtatgtcggctatgcggtgctgtgctatctgcaaagctggctgatggcaagcgtgacgcaacgcaccgcgcaacagctgcgcgaggagatcggccggaagatcaatcgcctgccgctcaaatatttcgacaaggtcagctacggcgatgtgctgagccgcattaccaacgatgtggacgcgatcgggcagacgctcggccagtcgctgggctcgctgattacgtcggtcacgctgttcttcggtgcgctgatcatgatgttctacaacaacgtaatcctaacgttgtgcgccatcggctccgcactgctcggcctgatcgtgatgggcggcatcatgaaggcctcgcaacaatacttcgcgcgccagcaggcggccctcggcgatgtgaacggccatgttgaggagatgtataccgggcataccgtggtcaaggcgtacggtggcgaggccgattccatcagccgcttcgaacgctacaatcaggacctgtacgtgtctggttggaagagccagttcctgtccggcctgatgatgccgctgatgaatttcatcggtaatttcggctatgtggtcgtatgcgtggtcggtgcggtgcttgcgatggatggcaagatcgagttcggcgtgatcgtggcgttcatgatgtacatccgcctgttcacgcagccgctgtcgcagttcgcgcaggccttccagaacctgcaacgctgcgccgccgcatccgagcgcgtgttcggcttcctggaggagtcggagttggccgacgaatccgataaacggccgttgctcggcgtcgatgcggacggcaggccgcaaccggtgcgtggcgacgtggaattcagccacgtacgcttcggctacgaatccgacaagacgatcatccacgacttctccgcttcggtgaagtccggtcagaaggtcgccatcgtcggcccgaccggtgccggcaagaccacgatggtgaacctgcttatgcgcttctacgagatttccgacggcacgatttcgattgatggcgtcgataccaaatcggtgccgcgctggaatgtgcacgatcagttctcgatggtgctgcaggatacgtgggtgttccgtggaacggtgcgtgaaaacatcgcatattccaagaatggcgtgaccgacgagcagatcgtcgccgcatgcaaggccgttgggttgcaccactacatcatgtcgctgccggatggctatgacacgattctcgatgacaaggcgtcgctgtcgcagggtcagaagcagttgctgacgattgcgcgcgcgatggtggaggatgcgccgattctgattttggacgaggcgacctcttccgtcgatacgcgtaccgaagaactgattcagaaggcgatggacgcgctgacggtggggcgtacgagtttcgtgatcgcgcatcgcctgtcgacgattcgtgacgccgacatgattctggtgatggacggcggcgatatcgtagagcgcggtacgcacgaggagctgcttgcgaagggtggtttctacgccgatatctacaacagtcagttcacgctggctggctgaacggttggctggctgaacggccagccggcagagtggttgttcggcccgttgatgggccaatgggccgaacagtcctccgcaacggcaggtgccatgcccggcgctatacggcgtggtgcctaaaggcgcttcttaagataagcgcccagatgggagatggcgaattcgagggatccgtggccggccggctgaatgatcttgtctttgatcaatgcggcccggtacttatttacccagcttcgactacgcccggttcgggtttcgattgcactgactgcggttgcggctggcgcgtcacaagccatggcattcaggaactcgagttccgccggcttcagcccgtccagcgcgggtgcgcatacggcatcatcgaaagcgatctgcgcgtccgcaatgccggtctcaacgtcgtttgcggtgattcccgtcgcgtggcggcgctgggaggcctgccacatgtaataaccgacaagttgcaccatgtaagggtatccgttggttgcctgcgccgccagccaggcctcgtcgttgccgatcgtcttgccggaatcggcgacggattcaaggaatgcgttcttgacatccaccagtggaacgttgtcaagctcgcaacgcagggctctgcgcaggaaagtgacgacatcgtcgttgaccaggtcgttgaccgttgatggcagccccgcgaatacgatggcgatgcccttcttctcggcgtcgggcacattggtctcatcgatggacgtagtgacgtgttgtatggctgtggcgatggcgacaaggtcgtcaagcgaagcggcctgtgtttcgtcgatggtgatgagaatgcctttccccttgccgatttttccgctttccaaacgtttggcgattgcattgcgtagcgtgagcggcgtggtggttgaggaaagatcgatatggccgaggcttgcgctggcgattcccgggatgctgaccgaagggctcacgcttgcctgattgatgtgaaggccgctgggcgtaagcgcttcaatgaggcgttgcgcaacatcgggtgaagcggtttcggagatggtctcccatccgcgctcggcggcgatgcggcgaaattcggtcaggagcacggtcttgccgaagccgcgctgcccggtgaccaacatgatgcgtcctggggcgccggcgccgttgtccagcccctccgtgaattcctcgatggcggtctcgcggccgatgagtatcggcggcattttgccggcagtcggcttgaatgggttcattgccatggagcaccttctccgtgaatcttttcgaatcaagacatgtgaacatgtatgaatgtatacgaaagtataccaacatgtacgaatgtatacgaagatgtacgatcatgtgtggcgctgtgcgagcgtccgtatgcggtatggcccgttcctcggcgttcgttggcgttccaagcttgttcagaacagccttccggggaaatcgctgctgacggcggcgtgacgactggcattcaaggtcacgtaggcgaacgagaacgcgcgtctcagctcttccgggctggtcgtgaacaatgcggtggccaagccgtcggccagagcggtgggatgggcggcaaacggtccgatgacatcttgaggcgacgaatccgaagtccgtggtgcgccatacgtggcacgcgcctccggctcgcgaactcgcgccgacgggtccggcgctgatccgggcatgtaaacccatgtggcttcggtctgttggacgggcaggccatcaatggcattgagcagatggtggatgctcagttgggtacgctcgttgaccgctacctcccagtggcgacgactgggggcgcttgcgcagagcgcgccgtcgatgatgtgcgccacgccaatcgcgcgggtggaatcatccgggtcctcgagtgcgatggctatcggttcggcggaatgaatcagcaggtcgcctcccgcgtcgattacgaactcggcggaagcagaggcaaggaatgcgccgagcaggtcgacgagataccctttgccgcaggcgccgaagtccagatcgactggacggcgggtgatcagtgtggtgcctcggcgttccacgtcatcaccccatgtgggccgccctcgcagggcgcccagatgctcggcggacccaggtttgaccgtgaaactcaaggaggcgtcgtagccgagacgaatcagatcttcgccaatgcacgggtcgattgcgccggaggtggcggcgaacaatgcgtcgtacaggccgaacagcggttcggtccaatccgggaaatcgaaattcccgccatgctttgcccgtccgatttcggcgacgagcgaatcgtctcggaaccgggacagcacctgctcgtacgtttccaagagctccgacatccttgtgcgcagatcctcatgtaccggttgaggcgttgaaatcacgattccggtgccaagcgccttcgggaaggctgtgacatggggcatgcgcagtgaaagggagaccatgcctacgatgctagtggtatttcgcttatagatggcggattctcctgaaggaatggtcgaaagggggtattcccatgcctcctggagacgttgtctccaggagaatccgccatctataagcgagatagtgcgtacagttgggcccggaaacgatgctagagtgattgacatagtgtcaacaaggaggttgtgatgagtggtggcgcggcgcagacggtccagtcggggcagtcccgaaaggcgctggatctgccgatgcccaaggtatgggcgttcgcggtgggccagttcggttgggcgttgctgtccggcatcatctcgaattggctggtgtacttctaccagcccgacaacgagaccatcgcgcaaggccagacggtattcgtgccgcaagggcttgcagtgcttggcgtcgtgacggtggtcggtggcatcaccgcgttcgcgcgtttcttcgacgccttcgtggacccggccgtggcaagcctgtccgatcgtcgccagtcggccgccggccgccgcatgccgttcctgaagtgcgccgcattgccgctggctcttgtcaccgtgctggtgttctggagtccgatcaacggaaccagctgggtcaacggtgtgttcctgttcgtcgccgtgattggctattacatcgcgctcacgttctattgcacgccatacaacgcgcttatcgccgaactcggtcatgactccaagcaacagctcacgatttccaccgccatctcgttcacgtgggtggcgggcaccgccatcgcgtatgtcgcgccggtggtctgggccggtttcgttccgggactcggccgcgtgaacgccatccgcctgaccttctcgatcatggccgccatcgcgcttgcctgcatgctcgtgccgccgctggccatcaaggaacgcgattacgtcaactcgcaaccgacctccgagtcaaccgtcgaatcgttgaagcagaccttcggtgacggtgaattccgcaagttcgtttgttccgacgtggtttactgggtggccatcaccacgttccagaccggcctgccgttcttcgtgacgagtctgctgaagctgcccgaaaccactacgacgatttacttcgtgctcatgaccgcggtatccgtgctgttctacctgccggtgaatctgatggcgaaccacgtcggcaaaaagaggatcctgctcgtcgcattcgcgatcttcacctgtgcattcgccttcgccggcgcgcttggttccggcttgctcggcgcgattccgcccatggcgcaggggctgattctttcgatcgtcggcgcgattccgatggccgcgttcggtattcttccgcaggcgattgtggcgaatatcgccgatgcgagctcgaagacgaccggccaggaccgccagggcatgttctatgcggcccgcacgttcgccatgaaaatgggccaatccgtggcgatgttgctgttcaccggtgtgagcacgatcggcatggcgtctggaaccggctatcgcatcgccgccatctgcgccgccgtgctgtgtggcatgggaggcctcgtgttcgcgttctacaacgagcgcaaggtgctcagcgtgctcgaatcctgagcgtcatcgacgtgtggaggcgcggcggaccagtatgggtttgatcagcgtggtggcgtgcacatgcgcgtcggcgtcactcatgtgatcaagcatttgggtcatggccttgcgtccgatatcggtggcgttggcggccacgctggtcagcggcagtgagccgagcggtttgatctgtgcctcatcacaggcgatcacgctgatgtcttcggggatgcgcacgccttggtcgagcagtgcgttgacgacgcctacacccaacggcgtgtccacggtgatgatgccgtcggggcgttcgccttccggcattgcggcgatggtcaggccggattcgtagccgtcttcgatgtacaggccgccggaatcgattacttccgcggagacttgcggcgtccggttgccgcgggtggccagcatgacggctttctgcacgccaagctggcggtcctgtacggattcgtagtcgaatgaatgcgccagaaacgcgagcttcgtgcagccggtgcggatgagttcctcggcggcgatctgaccggccgacacgttgtcggtcattatggagcagaccggatcggcgtcgcgggggtttgtgtggtcgatgaggatgatcggaattcctgcggcgcgcgcggccgccacgtcttccggtgaatcctccacggtgctcaggatgatgccggccacgttcatgccgatcagcagccgcaccatatcgctttgccgctgtttgtcggacaatgcgttgagtcccacgacctgcatgccgtggtcctcgcacacctcctgtgcgccttcgaagatcgacgtgaacagtgagtgctcgatgtcggtcatcacgaagccgattacgggtgtggcgttggatgcggggatctgcccgttgctgtgtttcggcacgtagccgaggtcggcgatggcgcggctgatctttgttttcagcgtttcggagacacgttccggatagttgagatagttggagacagtgccgatggagacgcctgcatgcttggcgatgtcggagacgccgactttcttgttggctggcatagggcctccttcggcttgcggttgatgctttcaatgaaatattagatgaagatcgcgattcccgttttgaaactttcaacacgccaagtgaaaagtagattgaaaatttcaaaacaaggatttattcttgaatttgtcaaggaagaaatatcaagtaacagcgaggttcttgaacgctctcgagtctcgttgaatatttcaaaagaaggaaaagagaaatgaacgctgcagctcagaagaaggaaggaatcggcgggtacatgccgctcgcggttgccgcaggcatcggttccatgctgggatccggcatcatcgtcggcctgtccgcaaccatcaccgtctggcagaacggtctcggcctcgacaccacccaggtcggcctgctttccggcatcctgaccttcgccatcgcgttcggctcgctgttcggcggccgtctggccgataagatcggccgtgtgctggtgttcaactggatcaacctgctgtatgccatcggcgccgccatctgcgtgttcgcgccggacttcaccgtactgctcatcggcctgatcatcgccggcgtcgcctcgggtgcggatctgccgatctccatgaccatcgtctcccatgacgccccgaacgacaaggtcgccgcgcagctcgtctccaccacccaggtgttctggcaggtgggcgtgttcatctccttcatctgcgcgttcctcgtctccaccatggagggtgcgatgggcggccgcgtggtcttcgccatcctcgccgtgttcgccgtcatcgcatggctgtggcgtctgatctccccgaccttccgccgcttccacgaggaagccgacgcccgtgatgccgccgcaggccacgtcgccaccgccaccgagaaggtctccgtcaccaagatgctgttcgcaggcaccgaaaacagcaagatgctgctcggcttcttcctggccatcaccatcttctactgcggctggaacctgctggccaacacctggggtcagttccagacctacatgctggtgcaggccaacgcctcccagtccctggccaccggcctgggcatcatcctgaacttcatcaccctcgccctgaacatcgccttcgcctccatcgcaggtggcaagtatcgcaacaagctgttcttcgtgggcatgggcatttccatcgtggccatggtctgcctggctctgggcggcaccaacatgtgggtcatcttcggcgccaccgcactgatgaacctcggtggtccgttcgccggcgaggccatgtacaaggtgtggacccaggaatccttcccgatcgagatccgcgcctccatccagggcttcatcaacggcttctcccgcctgctgtgcggcctgttcgccctgatcaccccggccctcgtgctgccgtccaccatcaagaccaccatgtggtgcttcgtgggcgtggtcgtgctcgaactggtcgccggctcgatcatgatcgccaagcagaacaagtacggcaccgacgaggaacgccagctcaaggcctcttccgccgaagcatgatacgacgcagggcgtctcccgctggagggaggcgccctgcccgccgataacaaaggagttatgagaatcatggacacgcaaatcatcaagccgattgcagtgggggacctgcacatcacgcgctttaccatcgaacacttcccgggagatgcgctcggcattccgaccgctaccccgcgcatgaactggacctattcccgcaccgttccggacggctctcagattctgctgaagatcagccgtcgcattccgggcgcgcaggctcgggaggagtacacctaccttcctccggaagacaatgtgctcgtgccttggcagttcaccccgctcgcttcacgcgaagaggtcttcgccaccgtgcagctcgtgtcagccgcgcacaagccgctgagcgatcccagcgccaccctgcacttcgaggccggcctcatgcaggaatatgagcatgtcgccgatttcgtgggaccgtcttgggcggaaccggaaaccgaccatcgccatctgccgctggtgcgtacggaaatcgcgatcaaggcgaagccgaagcgtgcacgcctgtatctgagcgccctcggcctggtcgaagcggaaatcaacggcgtgaaaatcggcaatgatgcgttgatccccggctggaccaactacgaacagcgcgtgcagtgctggacctacgacgtcaccgacgagctcaacgagggcgccaacgccatgggcttctggctcggcgacggctggtatcgcggccgtctcggctttgatggcggctatgtgaattactacggcgatcgtctcggcgtgttcgcgcagctcgaaatcgaatatgaggacggcggcatcgagcacgtctactccaatgcgtgggatcgtcagtggaaggcctcgctcggcccaatcgtttgctccgatttgtgtgagggtgaacggtacgacgcacgcctcgagcagccgggctggtccgagccgggctttgacgactcgaactggaagccggtttccgagattttctacgatcccgcgaaaatcgagaatcccgatacctcaccggtgcgcgcgcatgaaatcaacgaaccggtatccatcgcgcgcaccggcgacactcctgacggccgtggcatctggctggtcgacttcggccagaactgcacgcagcgcattcgtctacgcatcgcaggccttgaggccgggcagagcgtggaattgcatcatgtggaggtgctcgaaccgaacggtgagatcgccacacgcaccttgcgccgcggccagcagcatgacatctacacgtccaacggcacggacgcctggtgggagccgcgtttcgcgatgcatggcttccgttacgcgcagatcgagggcgtggtgggcgagctggccgtcgccgacatcgaatgccatgtgtaccactccgtgatggaccgtgcgggcgaactgaaaacctccaatccgctgctcaatcgactgcacgccaatgcattgtggtcgatgcgttccaacttcgtatccgttccgcaggactgcccgcaacgtgacgagcgcatgggctggacgggcgatatctgcctgttcgcgccgaccgccgcttacctgtatgacgtgtacggcttcctcaagagctggctcaaggacgttcgcgccgatcaggtcaaatggggtacggtgccgttctacgtgccgttcattccgctcggcggctgggctcatccgcaggccatctccacgtggggcgattccgcggtcgaagtgccgtgggtgctgtacatggagtccggcgatccgcagattcttgccgattcgtacgagttgagccgtgactggatcgacgaggtggccggatatctctctgccgacggcgtatgggaccgccgcccggactatgtgctcggacagcttggcgattggcttgacccgaccgctccgccggacgatccgacgcaggcgatgaccgagaaggagctcgtcgcgaccgccttcttcgcccgttcctgcgcacaggccgagcagattgcgcagattctcggcaagagcgaggacgtcgtacggttcggtgatttgcgcaagcatgtcacctccggtttcctgggacgtttcacgaacctggacggcacgatgacgtccgacacgcagtgcgcctacgcgctggcgattgcgttcggtctgcttgacggtgagccggtgcgccgcgtgaaggccggcaaccgcctggccaagctcgtgcgcgagtccggcggcaaggtgagcaccggttttgcgggtacgccgttcgtgctgccggcgctgaccatgaccggacataacgaggaggcttacgggctgctgctttccgaggagtgcccaagctggctgtatcaggtgaagatgggcgccaccaccacgtgggaacgttgggattccatgcgtccggacggatcgctcaaccctggcggcatgacctcgttcaaccattatgcgctcggctccgttgccgaatggatgcatgcgcatatcggcggcctcgaagccatcgaagccggatggaagcgattccgcgtggcaccggtgatcggcggcggcatcgatcatgcctccactgcgcacgtcaccccgtacggcaaggcctccgtggcttggaagacttccgaaacgggcgtggaactcgacgtgaccgtgccgatcggcgccaccgcagtggtggaactgcccgaccacgaaccgaccgaactgattggcggaacgcaccacttggtcgtggcgctgtaaatcggatccttccgctggcgggccgggccatgaagcccgccagcggggtcaacccggctgcaaaacaataagagaaagggataatcatgtcactcaacgatgagtcggcagtcgccgccgccattccaccggaggaaatcgccccagataccggacgtcgcctcaccacggccgaaaaactgcgcttcggcatcggcttcgcactgttctcgctgctgtggatgaccgccggcacttccggatccggcgtactgctgccgcagcgtttcgacgaactcaacatcggcaccccggaagtgattctgggtgcgatgaactccgtcggctgcatcttcgcgctgttcgcgaacatcatcttcggtgcgctgtccgatatcacgcgttcgcgcttcggcaagcgtaccccgtggatcgtggccggcggcttcgtcaccgcggccggctatgtgctggcgttctcgtccgcttcgctcgcgggcatcgtggcgggctggtccatcgtgcaggtcggcgtcaacatgatgatcgccccggccgtggccgtcctgtccgaccgcatccccgaaaacgtacgtggcaccttctcgtcgttctacggcggcgcaatgatcgtcggccagtccgccggcaccttcctgggatcgaagttcatcgacaccatgggcgtcggcttcgtgatcggcgcggtgctgttcgccatcaccggcattctgacgatcatcatctggcctgccgaacgctcgtcgaaggtcggcagcgcggcggacgacaccaaggcgaacgtgaagctcagcccagctgccattgcgaagtccttcattccgccgaccaagaactgccgcgacttctatctcgcactcgtcggccgtctgctgctgattttcggatggtccatgatttccggctaccagctgtacattctcaagaagtattgcggacttagcgttgacgatgccgcttcgacgcttgccaccatgtcgctgatttcgatggtcgtgctcatgatctgctcggtcgtctccggtccgatctccgacaagctgcacaagcgcaagatcatcgtggccatcggctccgtgatcatcgccgtgggcgtggcgattccgttcttcatgccgaccgcgctgggcatgatgctctacgctggcatcggcggcgtcggctacggcatctacatcgccgtggaccaggcgctgaacgtggacgtgctgccaagcgccgacgaggccggcaaggacttgggcatcctcaacctcgccaacaccgtcggccaggtactcgccccggtcgcgaccggcgcgatcgtggtggccaccggcagctacgcgcagatcttcccggtcgccatcgtctccgtgctcatcggcgccgtggtgatcatgctcatcaagaaggtcgcctaacgctgttttcccttcccgaaacgtgagccttgcctgtcattcctggtttcgcaaacctcgatagcgggcaaggctcacgccgttccatgccccgccttgctgggcaaagggtggcagtaaccactatgtgagacggagcgcacaagataggaaaatcagaaatggcgggattccgccattttgatgtcacctacaacaaaattcttcaaaaatcaagactgttcttcgggaatcttccgttctatgttgtggtcacggtgcgcgtgttgcgtacggcaacgggggcgcatcaatcgaacttttggaacgggctgagagagaggaaccggtctcatgtcattgcgcgacgtgcgctcgcagggccttggccgcatcaccgccatcatcgcggcgatgatgattgcgcttgccacgatgttcgctttcacgtcaatgccgcagcaggcgcttgccgccgacgactcccagacgaatttcgattcctggaccgaggtcgcggccaacattgaaaagcagctggagaccgccgagcaggactacaacgacggcaactactatcaggctggcaccgacttccagaatgcgcactgggtcggctacgacgcatccaacttctccaaagtcgtcaacgacaccatcggagccgacaagcagaaagcgctgctgcaggaattcaccgacctcgaaagcctcgcctaccagcaggatcagggcgacgccatcaccgccaaggtcgatgcgctgaccgccgacctcaacgcgaccgcgcagacgctcgacgccgacaccagcctcgccgatcccaagacatacgcgaagcagcgcgcggaagagaccgccaaggagcgtaagaagctcgatgccgccaagaagaactcgtccaagggcaagggcgatcgtacttggagcgacgtggccagcgaaatgaacgtcatcctcgacaaggcatacaaggccgctatctccggcaagggtgcggaaggctccagcctcgtcaacaacgcgtactaccagtactacgagaagctcggcttcgaaaagaacgtcatgaacgcgatctccggcgaccgcgtctcgcaggtcgaataccagttcaagatgacccgcaagaccatgcgcgacggcggttcccagaaagagatcaaaaagctcgtcgacgacctcaagagctggctcgtggaagacgcggccacgcttgacggcggtgcgaccggcaatgtcaacagcttcaccaagttcatcaccagctccgtcggacaggcgttcctcatcctgatccgtgagggcctcgaggcgctgctggtggtggccgcggtgatcgcctacctcgtgaagtcgggcaacaagcgcttcaccaagttcatctacctcggcgtactcgccggcttggcgggctccggcctgattgcgatgctcttcaccttcctgttcggcggctccggcccgattcaggagatttccgaaggcgtgtgcgcgctcatcgccatggccatgctgctgtggaccagcaactggatgctcaacaagagctccgtggaagcgtggaaccgctatatccgcaacaaaaccgaagccgctgtggccagcgcgcaaagcaagatggaggctggtgaaggcgtaagtttcggcatggtcgtctcactcgccatgctgagcttcctcgccgtgttccgtgaaggcgccgaaaccgtgatcttctacgagtccatctattcgatgagccaagactcgcgaggcatgtggattggcggcattgcggccgcggtcgtgctgctggtcatcttcttcgtgctgcgtttcacctccgtgaagattccgatcggcccgttcttccttgtcacgtcgattctgatggccgtactggtcgtcatcttcgccggtggcggcatccacgcgctgatcgaaggcgacctgatcgaaggcacctacctgagcaacgtaccgaccaatgactggatcggcctgtacccgtacgtcgaatgtctcgtggcacaggcgttggccgccatcgccgtgatcacgctgttcgtggtcggcttcgtcaagaagcgcaaactcaagatttccgatatttcctaaacggaactcccaagaaacaaaggaagagataatgaagaacaagaagatcgccgctctgctcggcctcctgctggccggttccatggccttctcgctgtccggctgcggcaacagcaatagctccgcctccaacgacaagagcagcagctcctcgtccacggccaccgacgattccagcaaggatgactccagctccgacgattccgccggcttcgaagagattcaggtcgacgagaagcactccgatcaggaagtcggcccgctgaccgtcaacgccgtatacttccagccgatcgatatggagccgtccggcatgggtctgaaggccgccgacgccagcttccatctcgaagccgacatccacgccaaccagaagggcaccgaactcggctacggtaagggtgacttcgttccggatctgaccgtgaactatgacatcatcgacaagacctccaacgaatccgtcggctccggtaccttcatgcagatgaacgcctccgacggcccgcactacggcgccaacgtcaagctcgacaaggccggctcctacaagctcgtgctgaagatcgaatccccggagaagaagggctggatgctgcacgtcgatccggaaaccggcgtcaagggccgcttctggaccgagccgcttgaggtcaccttcccggattggaactacactccgcaggagtggtgagccccaccatttaaaccataaatgcagttgagtcggagctcgcgaaagcgggttccgacttcatgcgtaattgtaaggggaaagatgctgctgcagtatgtgacggtgttgcagggattgctggcaccggctttgctgatcatggcgctgaacgtgatgctcaccgtcggtgaggggcgtgacaagccgctgagcgcgtactggcgcttgaccggcttcctcgtcggattcgcgggcgccatcgtgttcgccgcgctgcgtgccacggccgtcatcacgcagcgtactttcgtcaactatccgacgctatggtgttgcgtgatctttgacattgcggtgttcgtcatcgtgatcttcgcgcgacgcatcaccacggcatggcatgatcatcgtgccctgctggatgcggccaatctcatcgccgcgctggccatcgccgccaccaccttccgtgcgctgccggacgtgatcctgcgtcttacgattttcgtcgagccgggcgatccggtcttcacctccgatatgctgctccgcgcgctcggcttcgcgctcggcgccgccaccgcgatcatcgcggcctgcatcttccgtacgatgcgctccaccgccgtgcgctggtcgttcaccacggccgtgttgctgctcatcatgctgctgttcgcctctcatttcaccgatctggcgcagctgctgcaatccaagcgcatcgtcagcttcccgaccgccgcattcttggcgctcgtgtggggcatcaatcatcagcgcgaaatggccatcgccatggcgctcgtattcgtcattccggcggttgccagcatcgtcatgggcttcaaggtcaaaccgaccggacccaacgaggcgatcgcacgttcccatgtggcgttccgccgtcgcgcgaaggccgccggcgcatggagccttgtcgccatgatcggcatcaccgtggcattgacctatggcgtggcgcagacgcagaaggtcatcaccctttcgccgcctgaagagtactcgctcaaggacggtgtggccaccatcaccttcagccaggtttccgacggccacctgcaccgcttccaatacaaggcgaaggatggcaccgtcatgcgcttcatcatcatcaagaaaaacggcggcgcgtacggcgtcggcctcgacgcctgcgacaactgcggcgacgccggctactatgagaaggacggcaagatcatctgcaagaagtgcgatgtggccatcaatctcgcgaccatcggcttcaagggcggctgcaatccggtgccgttcgactatcaggtcaagccgggcaaaatcgtcatccaaacctctgtgctcgacgcgctgtcgagccacttccagtgagcggaaaggagtgatcgaccgatgttctttctccgcatgattttccgctcgttcagccgtcagttcaaacgccgtctgctgatcgccgtcaccgtgtgcctgtcggccaccgtgagcgtggccatgctcggcgtggtgttcgacgtgggcgacaagctcaacgcggaactgtcgacatacggctcgaacatcaccgtgcagccgaaggccgacgcggtggtgagcgatctgtacaacacgggcggatcttcgggttcgtcctccgattccgacccgaccgcgttcctcaaggaatcggatgcgccgaagatcaagacgatcttctgggcattcaacatcaccaattttgcgccggaactcaacatccacgtggacgcgggatgctcggacggctcggcatccgccgattcatgcaaggccaccaacgtgccgatcgtgggcacatggttcgccaaaaccctgcacatggattccggcgaatccaccgtggccggcatgaatggcatgcgttcctggtggaaactcgacggttcctggccgaaagacgacaccgaacagggactgatcggcaccaccctggcttcgcagctcggcgtgaagatcggtgacaccgtcacgcttggcaagaccatctccaccggcgaacgcaatcaggtgaaggtgaagatcaccggcatctacgattcgggcgattccgacaacaacggcatgtacattccgtccatcgtggcgcagacgctggcgaatctgcccgattcgatcgacaagatcgaagtcaaggcgctgactacgcctgacaacgatctggcgcgcaaggcatcgaaaaacccgaatgcgcttacgcaagacgagtgggagacatggtactgcaccgcatatccgtcatccatcgcctatcagatcgaagaggtgattccggggtcggtggccaagcaggtgcgtcaggtcgccgcattgcagggcgatgtgcttcagaaaacgcaggcggtgatggtgctgatgaccgtgctgtcgctggtcgcggctgcgattgccgtggcgaatctgatggccgcctcgattggcgaacgcggctccgaacttgctttgatgaaggcgatcggtgcgacggatggtgcggtttcccgcctgatgctcgccgaaaccgccgtgatttcgctggtcggcgcgctggtcggcgcgttgtttggctccggcgtggcgcagatcgtcggacacgtggtgttcggctccggcattacgatgcgtccgatggtgttcgtactggtgttcgtgctgcttgccgtcaccgtgctcatcgcctcgttctcgtcgattcgttcgattctgaacctgaagcctgcggaggtgctccatggccgctgatcgtaggaaacatgaaatgaccaatcgcaagatgttcttcgccatgctgtggggtgcggtgttccgtcgccgttcgcgtgcggtgatggccgtgatcgcatcactggtaggtgcggccacgctgttctgcctggcttccgtgtgcattgccgtacctcagcagatgaacgaggagatgcgcgcatatggcgcgaacctcatcgtcacccctgccgatgcgacctcgaaatccgaaggtatcagcacggccaccatcaccaacgtgaccgcgctcgtaacggccgaacacagcgcgaaatccgcctcctatcgttacgaaagcgtgcgcatcaactccgcaccgtatacgttggccggcgtcaatcccaaggccgtgcagacgctgaaccgccactggaacgtgaccggtgactggccgagcgagggcaacgtgatggtgggccgcgatgtggccgacgcgctcggggtgcatatcggttcgcgtatcaccatcggctaccgtgcctccgacaattcggccgcgtcctccgcatcaggattgtccgattctggagaatcggacaaccaaagcgacgaaaacgggtcccagatgtccgattctggagaatcggacaatcagacggtgggcaaactggggcagaccgaatcccaagtcaaggaaaacggccgcgtctcatccgacatcatgaacaatgaaggtaccgaattccgcgtggccggcatcgtcgataccggcggcaacgaggattccatcgtgtacgccaccaccgctgatgtggccaaactggccggctccaagcgtggcgccgacgtggtcgaatattccgtgaacgccatgggcgatgacctgaacgccatcgtcaaaaccctcaacgccaacccgaacaccggcgtgaaggcgcagaccgtcaccaaaatcacctcgtccgatactcgcatcatcaccatgctgcagacactgttctggatcgtatcgcttgtcgtgctggtgctgacgctggtcggcgtgggaaccaccatcagctccatcgtgagtcagcggcgcaacgaaatcggcctacgcaaggccttgggcgcatcatcgcaggcaatcggcaccgaattctacgtggaatccgccatctatgggctcatcggcggtctgttcggcacggccatcggctatgcgctggcccgtgtgctgtgcgtcaccgtattcgaacgtgccatcggctttaattggctgttgggcctcgcatcgctcgtgttgagcatgctgatcgctgtcgtcgcgtccattccgccggtctgccgcgcaactcgtattgaccccgccatcgttttgagggaggaataatcatgggctccgaaaacatcctgcttgagcttgaccacatctccaagatctacggcgacctgcatgccgtcgacgacctgaatctgaccgtgccggaaggcgaatggctggcgatcgtcggctcgtccggttccggcaagaccacgctgatgaacatgatcggctgcatggatacgccgtccaagggctccgtgatgcttgaaggccgcaaacttgaggatctgaatgccaagcagctcgccgacgtgcgcaagaacatgatcgggctcgtgttccagaaattctatctcgtgcctcatttgacggctgcggagaacgtgatggtcgcgcagtactatcattccgtagtcgatgagaagcaggccttggaggcgttggaacgcgtaggattgaaggatcgcgcacaccatctgccagggcagctttccggcggcgagcagcagcgcgtgtgcatcgcccgagcgctgatcaactgcccgaagctgattctcgccgacgaaccgaccggcaatctggatgagaaaaacgagaagatcgtgcttgacctgttccgtcagctgcatgagcagggcactacgatcatcgtcgtcacgcatgatgcgctcgtcgcctcctgcgcgcagcgagaaatcatgctcaaccacggtgtgctcatcggcgaaaagtggaatgatgaagcggcaaggcaagcgtacgaggcggccggcggcaagcccgcctccaccggctcgaccgccgagggcgcgcagaccggcgaaaccgccatcgaattcgccgatcccaccaaagccgccaaaaccggagctacggagtgatccaatccaacggagtgactgagtgactatgactgacgagaaatcgactgctgtgaaagtgatcgccctgaccgcggcgagccttgcgttgctttcggcctgtggcgagccgaaagcaacgccgatggacgacgagtatgccggcaactccggcgaaagcgtcgaatcgcaggaagacaagtccaaaaccgacggtaaggccaccgacaactcctccaacgacgatgattccgtcaaaaatcatgccgacgactcgaattccacgaagtccgacaagaaagacaccggcaattacgccgacggcacctattcgattaacggccaatacggtccggtcggcgaagacaccatcgatgtgcatctgaccgtcaaggatcagaacgtgaccgatgtgagcatagtcggccatccgttcacgtccatctccaaaaagcatcaggacgccttcgccaaggccgtgccggatgccgtggtgggcaagcctctgaaagacctcaaaatcgacaagatcgcgggcgccagctggaccaccgaggccttcaacaaggccctcgaggtggctcggcaggaggcttccatccagtaatggtttcatcattcgatttgtgaactgtttctttaccagcggagaaataccggatttctgtttggcgatgtaacgcctagcacatatcgtcttcggccctatcgcattgtgtgatgcaacgtggcatgtgaggcttccatgtgcgataatgcttatgtctgaaggtctgttccggcaacaatgcagcgttgaagggacaggaaatgaataatggcttagaccataaagccacgttgaaagatatagcgacgaaggtgggggtgtcggtgacggccgcatccttggttttgaacaaccgcagggtgcgcatctcaagagaaaaacgcgatcgtatcctgcaggttgcaaagcaactggactatcgtcccaatcaggttgcccgtaatcttgcagcgggtgaatcgagactgattgcgctgattgtgccgagcatagagaatctattctttgcatcgttggcgaaacggcttgaatgtgaatgtgcgaatgatggctactctctcgtcgtagcggtttcggaagaatcgcgtgccaaagagcatgcggtaatgaatcgattatcggctctcggggtagatggtgtatttttagtcgctgcccgtgaatcttacgaagcggagcgcgagcttcgcaaggatgcggagcgtgtaatgtgccctgtggtgttgatggatcgactgttttcaagctcgtggtgtgacggtctggcttttgatggctaccttggtggcagacaggcctcacagcgcttggtcgatgcagggcatcgtcggattggatgcgtaacggatgaagctgacggggaagggcttggagtgcgtacacgaggttttgtggatgtactccaggaatcaggaattggattcgatccagcattgtgggtgagaggagactatcgttttagcagcggttacatggcggcggacagactcatcgatatgggtgtgacggctgtgttctgtggcaatgacttgatggctgctggatttatacagcgtgtgacggaacgagggctatgcgtgccagcggatatatcggtggtgggtttcgatgatgtcttggagtactacggtctgtttcgcgcggtaactagtgtggcgcaagacatcagccaattagcgaaacgcggatggggcaagatgcgcgaatacatcgagttattggattccgatgatgttgacggttgtccgtggctggaaaatcaccatgccgaattattgaaaccgcatcttgtggaacacggaaccataagcgacatcgcaatgtgatggatggtcgtaatttcctggaattgatcaatcgggcgcgagtcgatatccgcttcgttttgtttcaaagcaaaggggatatgttgcggcgggtagggtttcctgtgacacgcctgaaataatgcggaagttgagaatccggaagcagtgcattatagttgtggtaacgttaccgcattgaaatggtaaaggagctgaattagatgaggtaacgttaccgcattggtgtaacttaatatatgcaaagaatatgcaagattgggttatctgatgggtgaaagtggcagacctgattcattcgacaacgtcgaagttccgaatgaattttgcggaacgcaatggaggcgtccaagtcgtccgcagtcagacatacataaaagaggcggcaattgatctcatccatcccaatgaggatgggttccggaagcgagactggcaagccgcacatggtattctcacagttgagaggaggtgttatggcgtacgttacgattcgcgacgtggcgcggcgcgcaggtatttctgtatctacggtgtcacgagcgctcaacggcaatggcaggatatccgccgagaccaagcatgcggtcgagaaggcgatggaagagctccactacattcccgactcacgtgctcgggccatgcgatcatcgtccacgaagaccgtcgggctgcttgttcccgatattcgaaacggatactttgcggatctggcgtatgcgattcaagacactctatctaaagcgggatattgcacattcatcggaacatcgtccgagaatgtgagacagcaggatgttttcatcacgaacatgctgtcgcagcatatcgatggggcgattattgtgcctcagggtgagatgtcggaggcattgcaacgtctgttgcgtagacaattgccggtggtatttgtggaccgtcgcgcggatgagctcgacatggtgcctttagtggattccgacccgttccccgggatggaatccgcattaagagacattcaagagcaggggcattccaaggttggatatgtctccggtccgattttggattcgcctactttgcgagagcgtgagcttgctttccgtgattgcggaacacgtttattcggcgaagagaatgtcttcgttgaatctaccagttttgaccagtcctcttgtgtctcagtgatacgccgcatgctgtcgtccggcgtgacgtcgatggtgtttggctattcgcctgataccgtacgtgccattgccatgatgaatggcgtggggggtgtgctggaaagtggaatgtcatttatttcatttgatgacattgagctattccgattgacgacgccgcaagtgtccgtgatttctcagcaagtgcaaagactgggttgtttaggcgcggaaaccttccttgacatggttcaaggaggtcacccgcgatcccggcgagtggagacaatctatattcagagaggatctgtcgagtctgtccgatgagggacaggagacgcaactgattgcgggcgcgagtctgcgattctgatcaacaacatcaatacatgccgcttgggcctgtttcagcagacccaaggaataagtgcatcttggtgcggtaacgttgccgcacccgtagggaaagcgagagaatatgacgcaactatctcttgtcggtgtctccaagatatttggaagcaccaaggtagtgaacaatgtctcggtcaaagtggaaccgggtaaagtccatgtacttctcggtgagaacggtgccggcaaatctaccgtcatcaaaatgatgagcggcatctaccaacctgatgaaggccatattgagattgacggcaaagaagtacgtattcccaatgttgataccgcccgtaaattcggcattgcagttattcatcaggagctcaaccttgttccgcaattgtccattatggagaatttattccttggcacactgccgaacaaagcgggttttgtcgatcgcaaaaccatggctgaaaaagccagaaaagccatcaagctcattgggttggaagaagacgtgcacactgcgatgggtgaattaggtgtggcccgtcagcagatggtggaaatcgcaaaagctctgatgcaggatgcatcgattctgattctggatgaaccgactgccgcgctgacccgcagggaatgtgaccagttgttcgccatcatggatgagctgaaggcgaaaggcgtaggtatggtcttcatctcccaccatcttgacgaaatagcccgtgtgggagacgtggtttcggtgctgcgagatggtcaatacatcgatacggttccagcgtctaccagtgaggatgaacttgtcaagcttatggtcggccgtgacattaccaaccagtttccacgcatcgcgcaggagccgggcgaggtactgcttgatgtaaaagagctgactcgtgaaggtgcgctcgataaagtgtcactgcaagtgcatgccggcgaggttgtgggattggctggcctggttggtgcagggcgaactgaagttattcgtgcgattttcggtgcggattcatatgattctggctccgtcagcgtgtgcggaaaaaagctgcagaagaagtccattgctcagtccattgaggctggtctgggcctggtgccggaagatcgtcgtacgcaaggtctaattctggatgcctcggtggctgaaaatctcggcttggcgactatgttgtctactgcaaaatgcggattcgccgatctcgcagggcaacgcaggcgtgagaacgagaccgcccaaaaactacgtatcagaatggccaacgtcaatcaaaccgcagggtcgttatcaggcggtaatcagcagaaaatagtgttcggcaaatggtccatggccaacgtcaaagtgctgctgcttgatgaaccaaccagaggcgtcgatgttggtgcccgtgttgaaatctacgaccttatcaatgaaattaccgccaatggaggcgcggtgcttatggcatcctcggatctaccagaggtgcttggcatgtcggacaaggtcctggtaatgagcgaaggccgtattacaggccatatgcccgctagtaaggccacgcaggaaaaggtaatggcactcgcggtctcccatatggatgacgaaaacgacaacgaacactgatcggattaaggagaatacaaatgaccaatgcagacaagaaactcggttatgattccggagacaagaccacggtcgctcgcatcaagacatttgcctcacaaaatggtgcgctaatcggtctgattatcctgtgtatcgccttgtccattgtggctccggcgtttctcagcgcctcgaatctcatgaacgtcggtatccaggcggcaaccgtcgccattcttgccttcgggcagacatttgtgattgttgctgcgggcatcgatctgtcggtcggtgcgacagcggctgtcgccagcatgctggttgcttacacaggtgccaacatgggacttcctgcaggcgtgaccatcattgtcggtctgctggcaggtgcagtattcggcgccttatccggtatgatgaatgcgttcctgaggttaccttcctttatcgctacactggccatgatgtccgtggctcgcggcttgaccttggtcatctctgatggacgtcctatctccacctccggcatggtcaacttcttcggcggcaccatcattggtattccggttccaatcatcatgatggtcatcatgggcatcattgcctccgttatcctgaacttcaccactattggtcgttctatgtatgcagttggcggcaacatggaggcttctaggctttcaggcatttccgtgcataaaacgcagattatggtgtttgtgctctccggcatcttcgcggctgtggctggcttggtcattgcaggccgtctgcattccgcccagccgcaggcggcagatggatatgagatggacgccattgcttccgttgtcatcggcggtgcgtccctttctggaggcaaaggtaaggtttccggcactttcatcggtgccattttgctggccgtcattcgtaacggtttgaatatattaaatgtctcttccttctggcagaaggttgttatcggcctagtcattgctttcgcggtcagtttcgatactttgcgtcgcaaggtcgatgctcactgatgcaactctgctttcctcaaatctccatcgcgtgattgctctctaaattgcgtgctccttgctccgaccccaaaaacataactgaaacgaacctaatccaaccaaatttggaaaagaaagaagaaagaccatgcttaacccgtgttttaagaaaaccatccgcgcagcagttgctgttgcctgtgcggctacgttggcgatcggtgcgagtgcttgcggcgcatccaactccggcaacggttccgacaaggtggctttgttgatctctaccctgaacaatccgttcttcgttgatctgcgggacggtgctcaagctgaggcgaataagctaggtgtgaatctgttggtgtccgatgcgcaaaacgattccgcaacgcaacagaatcaagcgcagaacgcccagtctcaaggcgccaaagcagtcatcattaatccggtcgattccgacgctgcgtctccagccgtggctccgttgctgtccgccaatctgcctgttatttctgttgaccgctccgtcacgggcgaggatgtgactgcgcacatcgcatccgacaatgtggcgggtggtgctcaggctgccgatgagttggcgaaagccattggagaaaaaggagacatcatcatcctgcagggcacccctggagcggcctccactcgtgaccgaggtgatggattcaagaaagaaatcaagaaatatgccggcattaaggtggttgctgaacagacggccaactttgatcgttccgaagcactcgatgtcaccagtaacttgatgcaggccaatcctaatatcgtcggagtctatgcagagaacgatgaaatggccctaggcgcgattcaagctcttggctccaaggccggtacggacgtgaagattgtcggttttgatggaactgatgacggtctgaaggccatctcttccggcaccttgaccggtaccattgcgcagcagccgaaggagctcggcaagcaggcagtacaggcggcagtcaaggcgatcaaaggcgagaaagtcgataaaacccagtcgattgaagtcaaaaccgtcaccaaggagaatgtcgcggatttccagtgactggatttgacacaacaggctgaggtgaagatgcctctgcccccatggcatgcggaatgcgttgagggaaaacgcagccaagaatggattccatttcgcaatccgcatgccaacactacgaaaggatagccgatatgcttactcatggaatactgaatgcacaactctcagctgcgcttgcgggattacggcacaaggatgtgttcgtcgtttccgattgtggtcttcctgtgccgcagggtattgaagtcattgacttggcggtggtattcggtgtgcctcgcttcgaagaagtgctggaagcgctacggccgcagcttgtattagaggagggtctgatggctgaagaggctcgaggcgaacaggccgaacgatgggtcaaagatcacttcaatgtacctttgtcttatgtgccgcatgacggttcggggggatttaagtcccatatcaagaatgcgaagtttgtcgttcgcacaggtgaaaccacctcgtacgccaatgtgattttccgatgcggcgtgccattctagaaatccgatgcatatggcagttgcttcattacggataacctgatttaccggaaatcaaaattaccgttaatgatggttcaggctgcctccggcagtctgaaccatcgacgcattttcacgactcatgcctttacaaacggccagatgagcgtggccatacgctccgaccaaggaacgtctgagtcggagtctttatacagcgccttacaggtgagcatggagcccagtatggtgctgaacaggaatttcgtatccagcccacggcggaaggcctcgcttgccacaccgcgctcgacgaacgtcgcaaaacgttgctccgccggcgtgattacctgatcggcgatcgtcttcaacgaatcgttgtcggacgagagcaccacgccgaccgctttcagaccgatctcgctgtcgaagcagttctggatacgttccaacatggcctgcaggccggaacgagacggctgcaaatcgctgaaatccggcaatcccgcaacttccagctgaatgcgttgcaacaggtcatcggcgtttttgtagcgccggtaaatcgtcgtcttggctacgccggaacggcgggcgacctcctcaatcgtaacggccgcaacgcctttggaaatcatgatctccaaagtggccctcatgatcttgcgatcggtctgctcacgtaactgctcgcgtcggccctgaatcttctgcacggctccttgcaccgccgtctcgaccacgcttgccggcgaagcggcaggggagacagtcggcggcacaccggtgttcattaatccattcatcacatgatcaccttcgtgctttccacctttgcgatataccatttgttgaacttcatcatcggaatgcgtagcagcaggccgatgagcaatagcggtgggatgaacagcgccagcgcgccgatcgacgtccagaaatcattgttgtatatgccggcgatggccgcacgcatggccgtgaccgaatgcgtgaccggtaggaacggactgatgtcggagatgatgcgcggcatgacggccagcggatacgcgccgttcgaaccggagatctgcatgatgaggaacagtacgccgatggctttgcccacgttaccgaaactcgccaccatcgtatatgcaaagaacgagtagatcagtgcggaaatccagccggaaaccatgaatagccacgggtgcacggcctgcacatgcatgaatagcagactgccgccaagcgagaacgtggcctgcatgagtgcgatcaccgcgaatacgaggtagtggccgaagaacagctggtgtggtttcgggttgcccagtgccatgcgggttttgcgggacacggaggtcttcaaggtcacggccatgagcagtgaacccacccacaacgtcacgaatgtgtacagtggggcgagctgcgagccgaaattcttcaccgggaacacggcggtgcgcttcaccttgacaggggccgcgagcgtggtggccagcgaatcggtgttcttgcccagcacgtccttgaccatgctcatgtcgccgctgttcagcgcgtcggacagcgtgtcattgaatgtggaaagcttgttgccggccgtggtgaggctgtcggcggtggagtccaacacctcacggatggtggtcagctgcttgtccgcactcgacgtggtcttgttgaggtcgccgagtgcgctcttaagattggcggcactcgcgttgagtgcgctcgaagcggtgcttacggagctgccgatttcgttgagctgcggcttgagattcgtgtcgaaatcggagtgcacggcattgatcgaggccttcgcctgcgtggcgagatccttgatggcggcttggctttccttggaatcgctgatgccgtcgtcgatatgctgcgctgcatcggtaagtgtggctgcgagtgtcttctgcatatcgatggcattgttcagcttgctgatggatgcctcgaatttgccgatgatcgccgtcagcgtcttcttctccaaatcggtcagcgaggtatcggtgtcgagcttgttctgcagatcatcgtgggttttctgcagatcgtcgacgatgtgctggtattgcgcggcctggttggtcacgttggatgcctgattgcgtaacgcggtcgcggtatcgcccgcctgcgtactcacattggcgaacaatgagtcgacctcgtctcccaccgcggcgaagctgtcgccggactgcttgatggcggtgctgagtgcttcggtggaggtgttcagcgcaccggataggtcggtcacgctgccggaagccgatttcagctgtttgccggcggttttcgcgctggatgcggcctgttggatcagggttccggagctgtcgagcagggtttgtgcgctgccggtcaatgagctgaaggtcttgagtgatgaggcggtctgcgtgagtccggccgcgaaatcgctgatgttcgagctgaactgttgcagttggttctttgcctcgggcttgtcgagctgatcggatagttgcgtggcgaggtccagcgccgtttcggtgagtgtcttcgagaacatctcgttgatctccgccgacacggtgtcggcgccctgaccggtcacctttggcgcgagtgcgttctttttctcattgttgtagtaggtgagctccgcatgcttggaatccttggagaagaaggtcatcatgcgcttgctgaaatccttcggaatgatgacggcggcatagtatttgccggatttcgtgccatcgatggcctcctctttggaggtgaaggtccagtcgagctggctgttggcgcgcagggtgttgaccacctgatcgcccacgttgatcttgacgggaatcagatcgcttttgtagccggcatcgacgttcgcgacggcgaatttgagattgccggtattggagaacggatcccagctggcggccacgttgaaccaagtgaacagcgcgggcagcacggtcaggccgatgacgatgatcacggacacgacgttgctggtgaggcgtttgacgtcgcctacgaacagcttccagattgccttcatgcgttgtccttttcgttcttcgtgcggtggtgcttggcggccttgcgcgtcagtttggccttgcgttcctccagggcgcgcttcttacggcgaatgcgggctttctggcgttccatgagcatgccttggatggcttcgtcgctcaaggaaccgagctccacctgacggcgcatgctgtcacgcatgtattcgatgaccatcaggaacccgatgataagcaacacccagatgatccatgtggccagtgctaccagtttcgtgccattggtcagcgagaatacggtggccagaatggtcggcacgatgaagcccgcaatcagtgcgccgcgcttaagcttcgggtacagttcggtgaaccggctcgcacggtactcgatggcctcgcggtagccgcccttgtcggacaggacgtggatgatctgcgacacgttatagccacgattctccaccatcggccgctcgccgatgatcatgtcgctttcctcgatctcgcgagcgaacaggcggttcagattggtcagcagcgggcggatcacaatgccgatgaagaaggcgatcgccacgaacagcagcatcacgccgaccatcttcagccaatgcccgtcatagaagccggcgatcgtctcgcggaaggcgtcgatggtatagcggaacgggatgaacgggtagaccgcgcggaagaatcgcggcatcatatcgatcgggtataggccggaacctcccggaatcagcagaatcgcgagcagaatgcacatgcccttgccaacgtgcatgaaggtggtcgacaacgcgtaggtgatgctcaggaacgtaagcgacgtcaatgtgccggtcagtatgaacatgaacgggttgaccgcctgcacgccgatgatcaggtcgccgattgcgcatagtgcgccttggatggcggccggaatggcgagcagcaggaagcggccgagatacttctcggtggtggtcagatcgagatcttcaaggtcgtcgtcatccacttcgagcttcatgatcaccatgtaagcgaacgcgcccacccatagcgagagggtgttgaacatcggtgccatgccggagccgtacgtgttcaccgggtagatgttcttcgtcttgatcacggtgggggactgcatgaaatcagcgattttcgtgacgtccaggccatcttcgccaatgaggtcgttcagcaggctcgcgcccgacagtgcgttcagatcggtggatagctggctcagcttgttctcgatggtctgcagttgctcatcggtatccttaagcatggaacgcgtgtcggcggagacccgctcaagctggtcgagtacggacgaggtctgttgcgtcaggaaattctggctggtcacggtgccggaaagggttccggcggtcgcggcgagcgagctcaggccgctgttgagttggggcagcgcactcgaattgatggcgttgcgtgcgtccgtggcggagttcagcgtggactgcgcggaggtgttgaactggttcgacagtttcgtggtgccggccaccgtgttcttggtgtcggtattgagctgattgaggtcgttgagcgtattcgccgactgtcggttacgtgattgcaggtcgctgatgatctgctgatactgcttgttcagttcggggctgacattggagatgtcgatcttctgtaggctgtcgagcactttcgcattgtcgctgttgaccttctgcatggtgccgatggcgctgccggcgtagccgttggccgccgccagaccgctggtcaccgtgttgacgctggtgttcgtctgcgtggacagttgcgagagcagcgccgagccttggtcaagcgaggccgatgcggtcgatgagaaggtgttgatgcgggtctgcgtatcggtgatcagattggcggtgccggacagccctttgccggcgctcgcggcggcggtctgtacgtcgtgcaacgcggcgcgtgcggcctgaatctgattgggggtgttggccaggttggcgctgagatcgctgatggtggtgcgaatcttctctacgttccgctgtgtcttgtcaagttcggcaacggcttcgctggtcacgttgtcggtctgtgtcgtgatggtatcgcttaccgagttcacggttttggagagcacttcgctcacagtggaaacgaaggtgctgttcacggtgcgatccacggtggtggttcccgaatcggtgaccttcggtacgaaggcgctggccttctcattcacgtagtattcgagggtcggacgttcggaattgccggtgatcacgcccgcgaggtcttcgctgaagtccttgggaatgatgatggccgcatagcaatcgcccgactgcacggcctccatggccttggccttgctcatgaactgccagccgagctgatcgttcttcttgagcgtgctttcaatctggtcgccgagattcagctggcccagcatggcgttgtcggtgccttcgtcgacgttcgccaccgccaccctgatgttgttggtgttgccgtatggatcccagaatccatagatattgaaccatgcatacagcggcggaatgacggtcaggccggtcatgatgacccacgccgcgggcacgcgaagaattcgcatgatgtcacggtgcaggatcttcagcacgttgctcataggaagtgctcccttttgccggatcgctccggtagtggcggtgttcacgactgtcgcgtagcgatacgcaattcgtagcgctacgcttcaagtagcgtaataccatctcccggacaatcccgcttcccgttctcagataagggcagtgtcgtaggaaatgcggcggaaaaggggggagatcattgtcagcgaatgtccaaaaatcttctagaaaccttcctgacggtttccagagatcggccaatcggctgttgttcaatacaactaacgacgtcgcataacccaagaacatccaccttctcgtgaaaggaacgatcatggtttatgcagctcatcatccacggcaaacgcatcgaccggtcggcaaaatcatcgccatcgcggcggccgtctcgctagtctccggttttggtgcgggcgcaggcgtagccgccatcgtgaaagcgagcgcaaccagtcagcaatccgtcatgtctttggtagggcagggaggtggcgccgacaccatgagctacgactacaccggcagctattccggggctctcaccgccgacggcaagtcggtggagtcgagtggtgaaacggtttccgcaaccagctccgaccagaacgcagcccttgtgcaaaatggcggaacgttgaccatcaccaatggcaagctgaccaaatccggcgacagtgacaacgccgacaactgcaacttctacggcaccaactccgcattgctggcggtgggggagaagtcgaaggccatcatctccgactcttccattgacgcgacgagctccggatcgaatgccatcttctccaccgattccgcatccgtgctggccaataatgtcaacatcaccacgtccgcggccaactcgcgtggccttgatgccacttatggaggctcgatcatcgccaatgcgatgacgatttcgaccaagggcgaccacagtgcgtcactcgccaccgatcgcggcggcggatcggtttccgtgaccgactccacgctgaacacggccggcagtggctccccactgctgtactcgaccggcgatattgaggtttcgggcgtgaccggtacggcgagcggttcgcagatcgccggtatggagggcctgaacaccatcctgatcaacaattcgacgctggaaagcacgaataccggcaccaccggttccgatccggtggcgaacggcgtgatcatctaccagtcgacctccggcgacgcggaatcctcgaccggtcaacatgccaccttccaggcgaaggactccacgttgaaatcggcgatcaccagcggatcgatgttctatttcaccaacaccacagccgacgtggtgctctcgaacaccgatctggacttcgactcggacgcggcgaacctgatcatggcggccggcaacgattcgaataactggggtaccgcaggctcgaacggtgcgacggtgaacttcaccgggcgttcgcagacgttgaagggcaaggtgagcgccgacaccatttcgagcgtgacgctcaacctgctggaaggctccacgtggacgggttccgctgaaatcactgagaattccgccggttcgacttcggacgctccgatcaccgtgaatgttgacggcacctcgacgtgggtggtcacggccgacacgaccgtctccgccctgaacgtggccgatggcggcaaggtggtggactcctccggcaaaaccgtcaccatcaaggccaacggcaaaaccgtggtctccggcgacagtgacctgaccgtcacggtcaccggctcctacggcaccaccgtcgaggccggttccgacaccgaactcagctcggatgtgactgaccgcacggcattcgacaagcaattcggcaccagcacctcttggtccttctgatccccacggcaaacccaatatccaacatcactgcaatagcactcaaaggagtacatcatgactaacttcgatttcgataccaggaacacccaaaaccagcagcagaacaccgacgggcagccgacccagaccatgcccgaacagcagggtacgcaggcttcgcagcccgctcagcaatattatgcgccgcccactcagccggcgcagcctgttccggattcgttcaatggtccggttgccgcgaagtccaataccaagctcggtggcaaggtcatcggcgtcgtggcgggcataagcctcctgtgcggtctggtcggtggcgtcggcggtgccttcgccgtgaatgcgctgtccggttccaatgagccgcagatgagccagcaaggtggcccgagccagggcggcccggggcagatgggcggccagtccggcaatggcaattcccagaatggcaatggccagatgggtgagcctccgagcgggcagggcggccaaagcggctctgatggccagtccgattccaatggcaattccggtagccagtccgacggctccagctccggcaagtccagtggttcgaactccagcagcagctattccgacgccgacgattcggacaccatcgccagctgaccgcatatgtcatgctgaatgggaacgcgcggcgttttcctcctcgcggtgaaggtttgcgccttcatcgcgaggattctttatgcccctaaaacgctatctggctgccgtgtgggcgaaaaacatgacatgccccgatatcggttcctataggccgctatttttagcgaatcccaggaaccgatatcggggcatatgggcaaagatgcccacacggcagccagatagcgtttagggggtatgaggtttcatgttttcgggcacttggcattttccctacgcgatattacgcgttttttgatagcgttggcccgggagggtgcacatatgaacgagcacgaaacaagcgcggccatcgccgacgaaaccgttatcgacgccatcgaaggtgcgcaagccgttgatgcggtgacggccgatgaatccagcaaccccgccgatcgccgcctgccgttgattttccgcatctacggcatcatcatgctggtcgagggtgtggtcacgctgccgatcatcgtgcttgcggccttgtatgcggtacgtgccgtgatcgaaggccgtatggcggtcgacgccatcaacctcaccgttatcctgtcggtcattcatgcggtcgtgctgttggccaccacggcctgtctggcggtgttcggcgtgctgctggtactgaacaaacggcgtcacgtggcgcagtggacatacgtgatgattccgctcaccctcgcggagggtctcttatcgttggcgttgcaaggtcttgacgtcaatctgatcgctccggccgtgcagctggtcgtgttgattgcgttgcatatcaccgccgacccgtcgctgcgcgaggagcgccgactgcagttcgccttgcgccgcatggatgcgcgtagtgagtacgaggatgccgtggccgtgggcatggccggccgggatctgaccggcaaaggctacatttcgctggacttcttcaatctgttctggctattcgtggtcggttgcgtgttcggtctggcgattgagaccatctaccatttcattctgttcggcgagtatcaggatcgtgccggcttcctatgggggccattttcgccgatttacggctttggcgcggtgatcctgaccgtgctgttgaatcacctgtggcggtccaattggctgctgattttctgtgccagtgcgctgatcggcggtgccttcgaatatttcaccagttggttcatggaaacggccttcggcatcacggcgtggaactatacgggtcaatggctgtcgattgacggccgcacttccggcaagtacatgtttttctgggggttgctcggtctgatatgggtcaagctgattttgccgcgattgctggcgttgattcagcgcattccgtggaaggtgcgttattcgttgacggccgtatgcttcgtgctgctgttcgtcgacggcgtaatgacgctgatggcattggacgcctggtattcgcgcatggccggcatcgcccagaattcaccggtctcgcagttctttgccacctatttcaatgatgcgttcatggtcgaccgtttccagaccatgtctatcgacccgtcttccgctggccgcatgtagccgttgccccttccccagacgggggagggttacgctgtgggcgtgacggcgttagggggtgcttgctatgccgcgaagctttgcgccagctgtcgaatcagatccggcctatgcccgctccaggacgagtttggcgaaatcaccactggaatctgcttgaatccggcgtccttgatctgctcgaacgttgagggattctgcgtcaagtcaatggccacatagcgtacgcccagttttgcaagctcttgctcggtggcttcgcactgcgggttgctcggattggtgaaaacggttacggtcatcgattcctccctatgcaagctgtactggccacgttctttggttgtgcttgttcgtctgcaaaccactatctaggatacacactacctgtagtggtgtgtcgcgcgtttcaccactgcatatagtggggaattccccagattgacgtcaggtacgaacgtttgttcgaatgattccagtctatcccaaagcgtggaatgtgacccatctcgcatgtcgccaatcgagtcctcgcccgttcctgaagcgtgcgcaggccgcatccgtccatgccgaccattgcggctggcgtatccgtcgcgtcatcgtcctacggattttccgcgcagatggattgcccggtggccaatgcgaacgatcttccagccctgaaatggcatgaggacactcaacaacgaaaggaacaggagccggagatggcgaatgaaatgccactgagatacgggttagtgctttcggaatgacattgctacgcaacgagatacgggacaagatgcgcaacgaaacgcgggatgagaacctgtgcccccccagggattcgaaccctgaacccacgacttaaaaggacgctgctctaaccgttgagctagaggggcaacagtgacatagtatacagcacattcggaccaaacgccacacgaattggcgatgcgcggtgaatctaccagtgaatatatcgggaattccgtcgtcgcccatcaaatcggcctagagtgaggcatatgtcatgcaccacgattcttgtaggcaaaaaagccagttacgacggctccaccatcatcgcccgcgatgacgattccggatccggccgttacgatccgaaacaattcgtcgccatcgcgccggaggtctcgaccgacaatctgtattggacgaaccggctgattgcggcgctcgccgatgcgcatttctatgagaccagcaatgcgattgaagcattcgcggaggccgctcgcacgtacggtcatcgtttggtcgaacatacggatgccgccttacgcaatatcggcaaggattcagacgattcagccatcggcgattccgtggcggagacagcgggggagccgattgccgggcggctgcaggcggccaacgacgagatggcggaatacttgcgtacgcatgccacgaaactgctcaacgacgtgctgtacacgtccagcaatcttatgcgcaacggtttcgcgatgtcggatcgctggaactgagcccgccgtacggcgcatcggctccggtttcggccgactcagttgaatccgacgacgtgttccgccacgaaatagccgttgcgaatcacgaaccgaccgattgagccgcgcagattcagcgcgcgcgacatggcctttctgcgtacatccgcatacatggaaggcgagtaggctttgatgtccgcccacatctccttctttttcgcatagttttccggcttgcgagacaggatcatgaacacgctcgccacggaagtctcaatcgccaggaaatgaatcatgtaacggtacaggccttccggcacggtcccgcgttccggggtcgcccgcaccatgtactggttcaccaggcgcagctggtccacgcggcggatcatcacgtcggtctgtacgctttggccgtcacggccgatgaaatagtggtagaacggcgtgtccaggtacttgatcgtcttcacccacgggaatggctggtaagcgtagatgaaatccacgtagaaggtgtgctcgggcagctgcatgccggatgcgcgcaccaccgcggtgcggaaggtcagcgcatgcatgagaatgtattccgccaatccgaaatggcccagatcgttccaggtcagtcgttcgtcggacttcatggcgcgacggaagttcaccacgtgcttcacgatcttgccgaccttgtcgtacacgtagttggtcaccagcatgtcgatcggatcggtgcgctcggcctcctcgcgtagtgtggccattacgagctcaagcgattcggcccccacccaatcgtccgcgtccacgaccttcacgtacatgccgctcgccgccgcgatgccggtgttcaccgcgccgccatgccccttgttgtcctgatggatcgcgcgcaccacgccgggatgccgctgttcgaaggacttcgccatggcaagcgtaccgtcggacgaaccgtcgtcgatgatcagcacttcgatgtcatcgttgcgtttcgcggcaatcagcgactcgacgcaccgtcccagatacgtttccatgttgtacgcgggcaccacgaaggtgagcgtcttcttctcctgcatattcttccttgggtaaagccaaaggcgtcggttacggtagcggatcgtccgattgccgcataacgaaactaacgtagcaccttgtgcgctttcggggtacccgttatgcacaatcggtaccccgaaagtcgtaaactgcacctgaaattgcccctagggataccttcggtacattcgttgacgtttgttcgcttaacgtcaatccttgcgactgcggtagccgtcagtccgcttccgtctcttccggcgaagaagtcgccatcggggatgactgggggaggggattctcggatttcggcccttttacggcttttctttcttccctctccatgcgtttttccgcctcccgttgcgccttgtccccttcgaaacgcagctccggcttggcttccatgcggctcaggccgtaccaggcgagattcacgatgtgcgcggccagctgctctttgctgagcttgcgctggtcggcccaatactggcaggtgtatacggtcatgccgatgagcatctgcgcataatatggcacgcccttggcgggcaggtgctggcgtttgaacgattcggtgagcaggtcttccacgcgaatgctgatatcgccgagcagtgagctgaacgatccggccggatcggttttcggcgaatctcgggtgagcacgcgaaatcctttggcgttttcctccacataggtgagcagggccagtgcggcacgttccacgatttgacgagggtgcgcctgttggtcggacagcgcgttgacgagtgtgtcggtgagtgcgcgcatctcacggtccaccactacggcgtacaggccttccttgccgccgaaatgttcatagacgataggcttcgataccttcgcggtcgcggcgatctcctctacgcttaccgcttcgaaccccttcgacgcgaacagtgaccgaccgatttcgatgagctgctcacgtctttgaaatgacgtcatcctggatgtactggccatgctgtccagtttttcacgccccgtggatgagctcctccgagtgtccgattctccagaatcggacacataaggtacccgtacacgcccttgcatgtccgattctggagaatcggacaactgtggggaagcggagcgtatctgtttgtctgattctggagaatcggacatgtaggatgcctgcatgtgcctctgagtgtccgattctccagaatcggacaggtgaggatggggcgatgtgtccgttgcggtttttaggctgggattatggataccaatgtgattatcgcgattgtcgccattgttgtgattgcagcgctgttgctgcttggtggttggtggttcggcaagtcgcgcaagaaagccgtagacaagtccgttgaggatgccaaggccaaggctgataagcgtcttgcccaagaagtccagaaagctgagacggcccaggaagccgaggaagtccaagaagcccaggaagtagcggccgaagtccctccgatcgcctcgacggaagaagcgaaggccgtgccggcggtggaaaccccggagtccacgggctcgcgcattcagcgtctcaaggccaagctggccaagtcaggcaatccttttggcaaggtattgttcaacatcctcgccaaggaccatctttccgagtccgattgggaggatgtcgaagacaccctgctacttgctgacgtcggcgccgaggccagcgaacagttggttgaggaactgcgtaacgatgcccgcatcagcggtcagtccgatccgtccgaagtgcgcaaagccttgaaagacaaactgctcaagctggtcggcaccgatacggatcgtcgtcttaacgccgacaaggaaggtgcgaacaagccgagcgtcatcatcatggtcggcgtgaacggcaccggtaagaccaccactgcgggcaagctggctcgtctgttcgtggccgacggcaagcaggtgatgatgggcgccgccgatacgttccgtgcggcggccgccgatcagctcgaaacctggggcgcgaaggtgggcgtaccggtcgtgcgctccgacaaggatggtgccgacccggcgtccgtcgcatttgaggccagtgaacaagccaaggaaacgcatgccgacgtactcatcattgataccgccggccgcttgcagaacaaggcgaatctcatggacgagcttggcaagatccgccgcgtcaccgaaaagaacctgccggtcgacgaagtgttgctcgtactcgacgccaccaccggccagaacggcatggcgcaggcgaaggtgttcgccgaagcgattggcattaccggcgtggtgctgtccaagctggacggttccgccaagggcggcatcgtgatttccgtacagaaggagctcggcgttccggtcaagctcgtcggcttgggcgaaggtccggatgatctcgctccgttcgatccggaaggcttcgtcgacggcatcctcgcctgaaggacggacgccccgaatgcaaacggccgaccctgcgtgaagcacggtcggccgtttggcatcttgtgcagttcttcggaacggccttgcctgccatgccctcgctgctatgcctgtgccggtatgcgcttgatggtaagtttcagcaacagcggagcgaccagcgtgaccagtgaaatgatgaagatgatcgtcgagtaatactcattgccgagcacatgctcgttgaagccgatttgcgccgtgatcagcgccatttcgccacgcggcaccatgccggcgccgatcatcaccgacgaggccgcaccgaagccggccattgcgccgcccaggccgcaaccgacgattttcgtaatcacgccgagaatcgtcatgatcacgatgaatacgatcatgcgtgaatcatcgaccgcggtcgtattcaagccgatgcccacgaaaaagaccggtacgaacagcgtatccccgaccggctctatataacggtccgtttcttcggcatagtcgctgttgcttaccgcgatgccggcgaagaatgcgccgaccgcgtagctcagtccggcaagatccgaagcccacgccatcgcaaggcagatgatcaccgccatcaccgcgatgccggacggcgccttcagcacgcccgcaagcgtcatgagcgccggtgcgatccatacgatcaccaccacggcccctacgaagaacgccgcctgcttcaggatgatgagtcccaggtcggccacgttcacgctaccggtgttcaccagcgtgcacattacggacagcaggatcacgccgatcacgtcgtcggccactgccgcgcccagaatcgacacgccttccttcgaatcgagcagtcctgcctccttcagcaccgccaccgaaatcgacacggacgtcgcggagaacaccacgccgatgaacgccgcaggaatcggctcgaatccgaacgcgaggctcaccccgcccatgacgaccaccgggaacaccacgcccatgcatgcgatgatgatcgccgccttcgagtatttcttcagcagctgcagatcacagccgacgccgcccaagaacatcagaatgatgatgccgagatcgctgaacagcgaaatgtagtcgcttgagtgcagcacattcagcaatgccggcccgcagacgatgcctacgagaatctgtccgatcacctccggcaactgcagttttctgcagaccagtcctgaacaggtggtcagcgccaacatggcgcacaacgagacgatgaacgtcgccatattttctccgtcttcctcacggtacgacagtgccttgtgcactgccgttcttgcggatattccgtgatgcctgtctccccgcaacgtatttcggccatgccgtaaacgggggtctgttgcgatgtcatgggattcgtgcgtactcctgccctccgccaggtcacattgtatgagaatcctgattccatacgattgccgatacgaaaaatagatgaaacattcgctgcggccatgatcgtgaggggttgttcaaggttggttttccgcctttttcgcggtatgtttcgcgggggtatgccaaaggtaatctgctagattgccgtatatggcgttacgtctccgtaacacttcgtaacgttttcaaaacgagggcggcgttccataccgttctgtcaaccccacacgatggggtcggaaattttcgaattaggtaaagaaaagagagggagggtgacatgggccagcttgattctggaaatgctgcgtggattttgacttccgcgtcccttgtgttcctcatgacgcctggtgtggcgttcttctatggtggcatggttcgtgcgaaggccgtattgaatatgatgatcatggaggcggccgcattgtccgtcaccatgatcatgtgggtgctgtggggctggtccatcgcctacgcaggctcttcggtcggcggcatcttcggtgatccggcaaccggcttcctgctgaaggacacgatggttgccgatgacggcgtcttcggttcggccgcgctgaactccaacaactatccggtcagcgtggatgtggcgttccagtccgcgttcgccatgatcaccgtcgccctgatctgcggcgccatcgccgagcgcgtcaagtacagcacttggatgatcttcgtcgcactgtggattacgttcgattacgctccgctcgcccacatggtgtggaacggtggcctgctgtccgctgacggcgccatctcccaggccatcggcgctgccgcccacgacttcgcaggtggtacggtcgttcacatcaacgccgcagtcgccgctctcgtcatcgtactgattatcggcaagcgtaagggcttcggcactcagccgttccgcccgcacaatgttccgttcgtcatgctcggcgccttcctgctgtggttcggctggttcggcttcaacgcaggttccgccttcgccgccgacggcaccgccggctacgcctgggtttccacctctgccgcaaccgctgccgcaatgcttacctggggcttcaccgagaagatccgtaccggccactacaccgctatgggtgccgcttccggtatcgtcgccggtctggtcgccatcaccccggccgccgatgtggtctccccgctgtgggccatcgtgctgggcggcatcgcgggcgtgctcacctgcctcgcctgcggcctgaagttcaagttcggctatgacgattcgcttgatgttgtcggcgtccacggcgtcggcggcttcaccggcaccgtgctcatcggtttcttcggtgagggcaccggcctgttcgctggcggtgattggcgtcagctggtcgtgcagctgctcgtggcgatcgtggccatcatctggtccgccgtcatcaccggcatcatcgccttcgctctggagaagaccatcggctggcgcgtcaccgaagcccaggaagtcggcggcatcgatcttgccgaccagggcgaacgtgcttacgattttgctggtaccgcaagctctgttctcaaggaggtgaagtgagatgaagctcattaccgctatcatccagccgcataagcttgacgatgtcaaggaagccctcgctgccgcaggcgtgcacggtctgaccgtgtccgaagccaacggttacggccgtcagcgtggccacaccgaggtctatcgtggcgccgaatacactgtggacctgattccgaagatccgcatcgaggtgctggccgatgacgccgacgccgagacgctggtcggtgtgatcgtcaagtccgccggctccggcaccatcggtgacggcaaggtgtgggttgcaccgctcgactcggtgacccgcgtgcgcaccggcgagactggctcggctgccatctgatccgcatcggttcggataggccgtattaaagacccccgggttattctcgggttatcaataagacagatccccgtacgtgctatgtgccgtgcggggattttcgtttccctccatcctccttctgatggcgagacgccgtacggggcgcggcggaggggcgcaatcgtcaaaaggacttgcactatgacttctgcagtcgatggtctcaagcaacgtttcatggccatgagccagccggatgccgacggcgtgtaccgcgatggtgcggcgaaacgcaaggcccgtaccgatctggccatggcttgcctcaaacagctctggcaggaggctctcgatgcggtctccttcgaagtgcccgccactggcatcggccttggcgcggtcggctcgttggctcgcggtcaggttggaccgggctccgaccttgatctggtggtcatttatgaaccgcacgccctgaccgatcggcaactcaacgagctcgccaacaaactgtggtacccgatttgggattcagggcttgacctcgaccagtccgtccgcacccgtacccaatgcgaggccgtcactgaccatgatctgcctgcggccatgggatggcttgacgtggtgccgattgcgggagatacgcagctcatcgaaaccacggccacctccattctcgaacgatggcgcaaggccgcccgcaagcgtttgccggaactgctcggttccgccacgtcccgactcaacgaattcggccgtatggcctacatcaaccaacccgatatcaaggaggcccgtggtggtctgcgcgattcggtgctggtcgcggcgcttgccgcctcctggctggccgaccgtccgcacggccggtacgacgatgccgtcgaacgcctgctcgacgtgcgtgactgcattcatctggtcgccaacaaagacacgaacatgctgctttcgccctatcaggccaaggtgtccgcaatgctgggccttgccgacccgacgttgccggatggcgaacgcgaagccaagtcgatcgacgatttgcagacgctgcttgcccgggtcggtcgccaaatcgcgttttccttggattccaccgcctcgcgggccgagcattccctcacccatgagaagccgagattcgctttcttccaggtgttccagccacgcggcggcggcaggcggcaggcgccgaccttcgatgtgatcgcccccggcgtggccaagcatgaggaggagatcgtgctggcccccggtgccgatccgaagaccgacgcgaaactcgcgttgcgtgttgccgtcgcatccgccgagttcgggctgccgatcgcacctggcacgttgcagaatctcaggaactgccccattcgcgaccgtgattgggatgaggaatcccgcaagctgttcgtgcgcctgctcgccaccggcccggaactgctcaacgtgtgggaggagatcgatttcgtggacattcccggccgttggattcccgaatggctgggcgtgcgcaaccgcccaagcgcttcggccgcgcaccgatacaccatcgaccgtcatatggttgaggtgaccacgcgccttggtcgcgaaaccccacgcggcaaccggtatgacgacaggcattacacggccctgctgctggccggcatcctgcatgacatcggcaagcgcccgggcgttacgaaccatgcgtccgagggtgcacgtcatgcctccacggtgcttaagcgcatgggtttcgaccgtgacatcatctggtgggtcacgttgctggtccgtgagcatctgacgctctcggaattcgcgaccgggcagaatcccaacgatccgacggtcggcgacgaactggcctctcgcatagatcatgatccggtgctgctcgacatgctgttcgacctgacccgcgccgacggctcctcgctcggcgccacttcgggcgagaccatttccaaacagtacggttggagcaagtggcgcgaatcgcttgtgcgcaacatgtacaacgccacccgctaccacatgtgagccggcagtttccgcgccgtcgcgattcttgattcgaacatgacgtttcatggcgaaggctttcgtgcgttgcgccgtgaaacgtcgtgcaacgccgattcaccaaaatgtggggaacatagcaccttccgttcacttcggcaaatcggccgctgacgcactctccagattcggtggattgtccccaagttatccactcagttgtccccatgttgtggaaaaccatgccgcttgtccacgtagttatccccaaaatgtgcataactcgctgatttccggattcgttatccacaataccccttgcgtagcgtgtcgcggccccatcaggcatggagacaagggaaacgaaagcgcacgccatccacacgcaatcgaacatggggagattcggacgcaatccatccacaccaccgttcgtgactatgcacaggtattatggttttcctcggtatcgaatcgataccgaggaagcactgataattgcggttggtgagcatggcagaagagactacttggaacggcgcccctgcacagggtcggcgaaacggcggattcacgccgagcggaggcaacggcttcagcggcggcaatgccgtacgcgacatgattttcgaccgcatcccaccgcacgacgatgacgcggaaatggccgtgctcggcggcatgctgatgagcaaggacgccatcggcgaagtctcccagaccatcgacgtcaccgatttctaccagccgcgcaaccagaccgtctacgaggcgatcatcagcctgttcgccgcctcgcaaccggtcgacgcggtgctcgtggccaaccagctactgaaagacggcgatctcgaaaaagtggggggaagcgactatctgcatagtctcgtcgcttccgtaccgaccgccgcgaacgcgacgttctatgccgacatcatccatcagcgcgccatcctgcgcaacgtgatcgcggccggcaccaaaatcgcacagctcggctataccgcggaaggctcccaggcggaagacgtcgtcaatctggcgcaggccgaagtctatgagatgtccaccggtaaagtgcgacaggattatgcggccatcggcccggtaatcggcgacaccctcgaccagatcgaacgtctgcagaacggtgaggtctcacgcggcgtgccgaccggatttcgtgacatcgacgatgtgacgcagggtctgcagccgggacagatgatcgtcgtggcgggccgaccggccatgggcaagtccacgctcggcgtcgatttcgcgcgtgcggcgtcgctgcaccacggcatgaccaccgtcatcttcagcttggaaatgagcaaaaccgaactggcgcaacgtatcatcgccgccgaagcgaatattccgctggccgccatgcgccgcgccgacgatatcacgccggaacgctggaacatgctcaacaatctgcaggacgccctgcagaacgcgccgctgttcatcgacgacagtccgaacatgagcctgatggagatccgcgcgaaatgccgccgcctcaagcagacgaacgatctgaaactcgtcgtgatcgactacctgcagctcatgacctccggcaaggccgtggaaagccgacagcaggaggtgtccgacttttcgcgtgcgctgaaactgctcgccaaagagcttgaggtgccggtggtggcgctgagccagctgaaccgtggcccggaaatgcgtaacgacaagaagccgcagctgtccgatcttcgtgaatccggctccatcgaacaggatgccgatgtggtgttcctcgtgcacaggccggacttctacgacaaggaggaccgcccgggcgaggccgacatcatcatggcgaagcaccgtaatggcccgaccgacacgttccatctggcgttccttggcgcgtattcgaagttcaaggatatgccgcaggactaccagcaggaggtgtgatatggcttggaactcctttgcgacgccattgatcggcaaggccgttcgcgcggcctcccgtctcgcacatggtggcggcagcgcgttcccgggcaagatcgtcgaacggatcgaccccggctttctggcacgtacgctggaccgcctgccgcttggcgtggtgctggtctccggcacgaacggcaagacgaccaccacgcgcatggtggcgagcatgctggaatcgttgggattgaaggtattcacgaacccgaccggctcgaacttcacacgtggtgtggtctcgtcgctgctgagtgaggtctcgctttccggcaagctggatgcggatatcgcggttttggaactcgatgaggcgtatgccgtacatttcgtcaggcaggtgcagcccgattactgtctgctgctcaatgtgatgcgcgaccagctcgaccgctttggcgaaatcgacaacaccgcacgattgttgagcaaggccgcggaagcgaccaccggaaccgtcgtactcaatcgcgaggatccgcgcatcgcacggcttgcggacgtcgtgcatgccgaagacggtgtggaagtgcgctatttcggtcttgatgcgtcattgcgcggcttctttccgtccgatgacgacatgcagacgaccgtcgacacggaaagcggggaatccgcggcgaacgcaacccacatcaatccaccgcaggatgtggataagtcggttgcgtcatccgtcgagtcaaccgaaatcgcagatgccgccgaaccatcggcggacgtgacgttgctcgccgtcggcgaccaccgcgcaagtttcggcatcgacggcaaaacctacgaaaccgacgtcaggctggaaggcgtctacaacctgtataacgcggcggcagcgcttgccgtcgtgcgtgccgtcgccgccgatgcgaacgccatgttcctgccgttcctcggtgcggatgccaacgactccggggattcagccgcagacttcgccacgcaggccgtctattccaccggcccgatcgagtcgccggaaatcgacgtgccgtctgccaagaccctgcgcaagcttggtatttcgccgcgcatcgtagatttcgcacggtccaccacgcaggccatgatcgacgcggcggcgcaggtcacgccggcattcggccgcggcgaagtcatcgatgtgaacggctctcccgtggaactgctgctcgtcaagaatcccatgggattccgcctgtcgctcgcctccttcaagccggaaggctgcgacaccatgatctgcatcaacgacgaatatgccgacggtcgcgacatgagctggctgtgggacgtggacttcacctccttgcgcggcaccggcgtcaggatggtttccggcgtacgcgcgtgggacatggccctgcgtctcgaatacgatcaggtgccggtcgaggccgtcagcaccgagctcgaagagtccgtcacggcattcgtaaacgcgaaccccggtacgcgcaagcacatctactgcacatacaccgctatgctcaaggtgcgcgctgccctgggtaggatcgccgacgtctccgacgcgggcgtgggcaaataataagggaaggcgaggaatatgagtcaggcaatcgacatcgtgtcgctgtacccgaaagacatgaacatctacggcgactccggcaacgtgctcaccatccagcggcgtctcgcgctatacggctacgaaccgcacgtgcatgcctacaatcagggcgacgagtggcccgagcacgtcgacatgattctcggcggcggcggccaggacaccggtcagaagaaaatcatcggcgacttcttcatgcgcgccgatctgctgcgctcacttgcggccgacggtatgccgatgctcatgatctgcggcctgtaccagttgttcggcgaatatttcgagacggtcgacggctcccggctggacggcatcggcgtgatcggcgcctatacggtcggtcgggaagtgcgtatgatcggcaatctgaccgaaacgtccgacgacttcggcaagatcgtcggctacgaaaaccattccggccagacgttcctgcgcgagggggtgcagccgctcggccatgtcgaagcggacggcaccggcaacaacggtgaggatcataccgagggagcccgcgtgaacaatgtgatcggcacatacatgcacggttcgttgctaccgaagaatccggccattgcggactttctgattcgtaccgcggtcgagcgccgctacggcacgttcgatccggtcgcggtcggtcagacctccgcacagaaggctgcgctgaaccgtatcaacgaggttgcgcaacgtgcgcgccgcgtggctatgtcccgcccgcgctaggtggcggtcggtctgacggttcgggctggttcctacggaagctcgctggttcccacgaaaaccggctcatttccacgtgaaaccgctccgttcccacaaataccaatctatctatgacacccagccatcataaacaggccagtatttgtggaaatggagcgttgcttgctagaaataggccgtaatcaggaggattggccagtttcattcaatgcgggtgtgaagaaagtgcgatagagtggtaccaccatcacccaagggaggtaatcatggctgattttgattttggtgacggcctacgcaaggtttttctcgccggcgtcggtgctctggcgaccaccgttgaaaagagccaggagatcgtagacgatcttgtcaagaagggcgagctgaccgtggagcagggcaaggccctcaacgccgaactcaagcacaaggtccaggaggccaaggaagcttcggaagaggccaagcccgaagccgaaacggaaaccaaggccgagtagcattcgttcgattcgccgtctgccgcgcataggcgcccggacggcgaagtcgtgttgtgcgagtggtgatatgtctgtgaatgcccagtcagatagatcggataatgcgcgtccggaaagcgtggaaccggtcaccctgtccgaccgagtcaacgcggtgatcaatcccgccgccgacccgtcgccggatgcggccgcgacggctgccgcaaagtcgggggttccgcaatccacgcagtggcagacgtccatcgaaacgatcggactgttcggtccacgcaaggacacattttccacgcgctatcatcttacgcggcgcggcaagctgaagcgactgaagcagattgcgcagatcgccaatcattttgatgttctgcatggcctgacgccggtcaaaatgcggcttatgctggaagcgctcggaccgacgttcgtgaaggtcggccagattctgtcgatgcgttccgagattctgccgcagccgttctgcgacgagcttgccaagttgcgtgccgatgccgatccgatgccgtacagtacggtgttgcaggtgcttgaagacgagtacggtcggccggtcgacgagatcttcgaccatatcgatgccacgccgcttggttcggccagccttgcacaggtgcatcgtgcgaagctgacgtcgggcgaagacgtggccatcaaggtgcagcgtccgggcgtgcgcgaaaccatggcgcaggatgtgtccatcatgcgttccatcgccaaagtggccacaaggaccatgcacagcgcacaggtggtggacctgtccggtgtggtcgaagagctgtgggacacgttcgaatccgaaaccgacttcttggtggaagcgaggaacctgagcgaattcaaccgtttctgcgaacggtacaagtacatggattgcccgaagccatacattgacctgtgcaccgagcatgtggtcgtgatggactatgtggagggcatctccgtctcgcatcccgaccagttgctcgaggccggctacgatctgaaggagatcggcaccaaactggtcgacaactatgccacgcaagtgcttgacgaaggcttcttccatgcggatccgcaccccggcaacatcatggtgagcggcgggcggatcgtgttgctcgaccttggcatgaccggccggctgaacgcgaagacccgctccgtgctgaaggatatgatcttcgcggtggccgaacaggattcgcccgcgctcgccgacggtctgctgcgtttcgccggcgcggaggccgatccggaggattacccggcgctgcttgccgatttggatgtgatcgtcaaggaattcggcaccgttgatttggtggagctcgatattgccgcgatgctgaccgcgctgacgcagatggcgcagcgtcacggcatcgaggtgccgagtaccgtcactacggtcggccgtgcgctggtcacgttggagggattgctggacgagttcattcccgacgtgaacatgattcagattatttccgaccatattgcggcgagtacgtcgaagaaggatttcatcaaggaggagacgaagtcgctggcgattgaaggacatcaggcgttgcatagcctgcttgccgccgccaacgagcttaaggtcgcctcgcgtatgcttacgcgcggccagttgcgtgtgaatatggagatggtcggttctcaggagccgattcacctgcttgccaacatggtgaaccggttgacgatggctctgattgtggtcggcctgttcatcggttcgtcgattgtgtattatgcgggcatcaagccggtgattttcggcatcccgatcgtaggcttcctcgggtacgtgatcgccttcattctttccgtctggattgtcttcgacatttacttcaagggccgtaactcaaagaagcggtaagcggccctgcgcattaccgttccccatgcctcccctgtcggtggcctatgcccccgcttcatcccctccgaacgctattgtgtaccccatgcgtcatgcctggtgggcgtagtgacccacaagtcgcgatcccgtaggaggtgccatatggccgaagccgaaccttggcgtcctctgccgtttgatgaggtgattgacatttcggcgggtgaggcgcgtaagcgccggttgcgccggcagttgcatgcatggtatgcgtttgtgatcacgctggtgattgccgcaatcaatatcgccggattcccctacgtgctgcagtggcgggcctcgctgcgcacggcgcagacggccgatgcggccgcgcagcatgttgagggttggccgtatccgcaggccgaggaggcattcgctgcggcgaaacgatataacaggaagattgccgcttctgatcagaccgttcttggtgaggccgaagacccgttcaccagtacggcgggcggctcgcatgcctccggcaaggattcgctggccgccaaagatagtgagtatcagtcgttgctggattccggcgacggcgtgatgggtacgatccgtgtgccgaaggtatcgatcaaactgccgatttatcatggcacgtcggatgctgcgcttgcttccggcgcggggcatctatatggcacaagccttccggtgggagggaaaagctcgcatgcggtgattaccgggcatcgtggcttggtggaggcggccatgttcacgaggcttgatgagatgcgcgagggtgacttcttctacatcgaggtgatgggggagaccctcgggtatgaggtggaccgcatcgatgtgattgagccgtcggagacgagccggctgcgtgtggtcaaaggcgaagaccgcgtaacgctcatgacctgcacgccatatggcgtgaatacgcacaggctgttggtctccggccatcgcgtgaagatcccggtgcccgcacctgatccgaacgccatgcatgatcccatgcggatggggttatacgccgtactgggtgtgcttgttcccggctggctgttcttccttattctgggacgtcgccgcaatccacggcctcgcatcatgcggcatgcggtcgttcacctttagttgtgtcgcgcagatgcactgcccgtcatcccgccccctattaacgagggtattttgtgtggttttggggttgttgtaaggagggtgtagacttccgaacagcatgtctttgtaaggtatggataacgatttgttctaccagtgtttacgtagcgaataaggctaaggataaggtttataatgggtgggttctcttgtttgcgtggaggggcgaacaagggtgctctgagtaatgttccgcaacccgttgctgccgtggtggccgttgtgatgctcctcgtcacggtgatcgtggcgccttccgcacaagccgatgagacttcgagtgtccctttttcggatcatgtggtgagtaataccgtgagcccgtccggcactaccatcaatttgttcgattattgggtgcagccgtatgggtgcgcggatattgatgatagctactgcaacggtcaaacgtttaaccactccgacacggggatcaatgcaggtaaacagctacgtttcacgtataacggcgaaggccaaaacaccatcaacaaatggacgggaagcgcctcgccgcgcaagggaatggtcaagtcgctgctgcaggacggctatccggttatcgcggcagatcaactgtattcctgggacggcaagataaccgacggtacgcaatcgctggcatacctgttcgataccgagaataccgagagcgattccaggaaggtctatccgaacgtaaccggcctactgcagctgcagaacggctactatgtgtacgatagcaccaagaatttcgctacattgaacgacaagtccacgtcgggcaaatcgtcatattccatgaccttgtacgatactccgggtgtgcgggcggaatggggcagctccgttggtgagtttttcccccttcaactctgccgaagacgtgttcgaggactccaacgggtcgttgtcgaacaaggtttcgtcgaggaactccgtgctgaaccattacttcggcgtgcattcccaatcggagttcatgcagccggtcaacggcatcatcaacgacgaggcgatgaccttcgacttccaaggcgacgatgacgtatgggtgttcatcgacggcgtgctggtcggcgatgtcggcggcatccacaacagcgccgccttgcacatcgacttccagacgggttccgtgaaggtgacggacgcatccggcaacagcacctacaccaatacgacgattcgcgagatgttcgccaacgcgtacggtggtgaggattccgacgaattccaatccgtagaatggtcacagaccaacacgagcaccttcgcggatagcacctaccacacgctggacttcttctatctggaacgcggcaacaacgagtccaatctgaaactcaagtacaacctcgccgacattcccgaaaacaacctggtcaagctcgaccagcaaggcaaccgcgtggccggagcgaacttcgaactgtacaaggcgggcagcgactattcctacactgccgccgacctgattagcaagggcaccaccgataaggacggcgtctatacgttcaccaaccacgagaccggcaagccggtgaatttcgccgatctcgcccgtaacggccggggcatcacgcattacgtgctgaaggagaccaaggctccgccggggtaccgcaaatcttcggatattcatttgcgctaccagatcagtcccgcaggagacggcgtgctgctctgcaacgatgagagcggcaaatgggattcaggcgcgtggtcggtggcccacgaaacgatgaccgtggccgacggcgccaccgtctacgacatgaacggcgcatcccatgacgttactcaaggcaaggtcttcgccgtcatcatgcacagggataagacggccgccggcacgctggagtccgatgcgtggagggcggtttccggtagcgcattggaaggctggaacctatcgcccgatgcggtgaatggtatggctgacgtcgtccagctggccaagtcggatggcgccggaagcacgaactacctgcatttcttcggcctggattccgaaggcaagtattcggcctcgatttccagcctgcccggtgacattttcacctactatttcatgcgctccgacgaggaaaaggctgattcgctgtatgccatgggcgtgtactacaccacggccgattccacggacggcatcaatgcctcgaacaccgttcgtctggacactacggagacgggcgcatacggccggcagttcctgcgtaatttcggcgtgcagatcgccatcaccgatgtgcgcaacgatccgatcgtgcagaaggtcgatgatgccggtaacccagtggaaggtgcggaattcagcctctatgccgcggatcaggtcaatgcggacggcacgagcctgctggagggagcgaccgcattgcagacctgcgtcacggcgaatacgagctatccgtacgagatgaagggctcgtgcatgttcggcatggcgggctcgtcttccgaaggtgtgcaaggcagtggcgtcgatctggacaacggcacctattacgtcaaggaaaccaaagcgcctgagggttatgagatcaatgatacgttggtgaaactgctcatcaccgataacggcatcttcgcagacgccggcaccgaagataatggtgtctccaccatgactcatatcggtacgttgaatgaggtgctgaaacagttcgcggccaatcgcgatatcaatcgcacgctttccgatctgaaggtcacgcagttgcgttgcgcggatgaggaatgtgtgaccaatggcagctggtccgaaaccatcggctccgaacatgggaagtccgtggacgtcagttggaccggcgactacaagaatggctactacacgctgaccgatcaaagcaccatgacggataacggcttcgtcaacacgaccggttggacgtactacaaggtcagccaggccgaagacaaggacgatggctcccaagggaagggcgttcgtttcagtctgaagaattccaatctggcgcatatattcaccggcgcgaacgtgattcgcgtgcaagataagcgcaaggccagtctgacgctcaccaagaaggttacggtgggtgacggttatgacaaaccggatgattttgacacgcagcggttctcgttcgacgtcacgttgagcgcagatgacgccgccacattgcagcaggacggcacaaccgactattatcatggcacgatttccggcggtaccggcgacggcaagaaggacgatcagcagatcgtcatgaaactgcatcgcgattccgaatccgctacttccggcaagctcctccagtgcgttgcggatggcgacaccgatgcggagaagtgtgcagagaccgcatcgatcacgctgtccaacaagcagacgctcagcatcgccaatatttcggacggcgtcacatacacgattaaggaaacgggcctgccgaacggttacgtgttcgaaagcgcgcaatccagtaacctgaccggtaccattcagcgctcctccggcattgcggccgcggtggtgggcaacgtgtaccagccgaacagcattacgttggttgcgggacagttcgtcacggtcgtgaagaaagtggttggcagcgcaacaggctcatatccgtttgaattccagctacaggccgcgcagggcacgccgctgcctacctgcggtaccgccgatacctgttccgtttccgatgtggacgccaacggcaatcatgtcatgaagaagacgttgacgtatcagacttcgggtgagcaatcgcagagcatgacgttcggtgacatcaccttcacgaagccgggcacgtacacatattcgttgtctgagatcacgccgtcttccggcgctctgcaagggttcaactattcgcgtgcgcagtacgtggtgacggtcacggttgcggttgaggatggcaaccttgtggtggccggcgtcaagacggtccgaacatatgacgattccggcgccgccgtgaccgggaccgatgcaacggctactgagaaccaggccgtatttaccaacaactacagcaaggacccacgagccgtcaccttctccgccaccaagaactacacggaaaacggctacccgtatcaggccggcatgttcagcacgaagctgacggcaatcggcagctatgcgaccgccagcggagccaagacgacggtggcggagctgccgaataatgcggattcggtgccgatgcctaccggtagttccacgggcagcatggatgccgacttcgatgatttccacacggccagcttcccgcggatctcattcgatggcggtaccggcaacaacacctacgtgtacaagatcacggagaacagcggaaccgtggccgacgcgaccgccatgacctacgattcgactgaatattacgtgttcgtggccatcaccgtcaccgatgatatggtgaacgccgatatctcgtactacaagaacgaagccggcaccctgaccaaggtggagattcctgcggacggctcgaatccggtccggttcaccaatacgtatgcggcttcggcggtctccgccactccgcagggcagcaagacgctgaccgggcgcgcacgcacagccggcgactccttctcctttgcgctgaccgcggcggacgaagccacccaggaagccgtgacgaatggtaccgtcagcggcgccgcctgcgcagacgactgtaccgccgaaagcattctcgccagtgcgacctcaacgaatgtgacggcggaatccggtgaagcgcaatcattcgagttcacgcaactcacgttcggaaaagccggaacctacaccttcaacgtggcggaacaatccggcaatgccggtggcatcacctacgacacccatatatcgacggtcacctacgtcatctccgataccgatgccaacggcaagcataccggcagactgaacgtggcgaaggtcagctacagcaacgccaccgccacgaccgaagccgaccgcaaggttacggatgcggccgcgttcaccaacgcgtatcacgccaccgcaacgtttgccggtctcaccgtaaccaaggaactgcacaacaggaacgccggcactacacgcaacctgtatgcgggcgaattcaccttcaccatcagtggtgacgatgaagcgtcggcacaacgcatttcggctggaacgtttgcgagcgaccgaaaattctccaacgggtacgccgctggcagtgaggcacaaagcgcaacggaatacggcaatgccgtaagtggcatgaccaagctttccaatctggtgttcaacgaatccgatgtcggcaagacctaccgtttcgtggtcaaggaactagcacaacacaccaatccgaataccggagcggtgaatacaaagttggactcggattctacgaagctgacaggcgaaacggccacggatgtgaaaatcgacggtatctggttcaggcagtggacgtacctggtgagtgtcacggtgagtgacaacggcgacggcacgctgaacgtgagtacgtccaagagcgtggtgaaaggcgacggctcgacgtcgacggctgatgacatcacattcgtcaatacgtatgaaacgctgaaagcgacggaaatcgacgatacttccgcatccgcgccgctgtacaagcagctctccggccgcgactggtctgattccgaaaaagaccggttcacgttcacggtggagaagtgtaactacagcaccaacgccggttcgttcagcgatgcgagctccatcgtctgcacgagtgacggcactgcgctgagcacgcttccctcgccttcaagaaactcttcagtgactataggcaaggaccaagtggtcccgaccaaggccggtaatttcgccaagattgggttcggctcattcagcttctccaagccgggtgcctacgtgtacaaggtgacggaagtcgccggtgacgataccacgctcacctacgccgccaacgtgcgttatctgcgattccgtgttgaggaaaaccagatgaagggcatgtattccgtaatcgttaccacgcctggatatgatgcgccgacggctaccgacgccaatgacggtgccgcattcgtgaatgtgtgcaagagcgcggagcgtctgccgttgacgggtggcctgacaaccagaaacttcctggtcggaggatttgtggtcggactgctggcggtgttcgccggactgggcattcatgagtggtggaacaagcaacggcgaaaggaacagctattggaatagacgtaaggcatcccgtagcggctccggcaggtgtttgctgcggaatcccggaatgaagacttcataactgaaataccgaatcgattgaaatttgtggcgtcctaacgaaatggatcggcgggacgcgaacaaccgaacgagagaagaaggactcatgaagatgagaaaactattcgccgtggtggccgcagcagcgaccctgatcggtggtgccgtattcggcgccgccactgccgttgccgacggcacggcgacgattaccattgagaatgcgcagcaggggcatacctataaggcgtacaaggtggcgactttctccaacgtgaagttgaacggcgatgtcatcacctctatggatgtcaataccgagagcggagacaacctgcgtacagtactgactacagccattgagaaggctggaacaacgattcctgacgaatacacgaccaatccgatggcattcgtggcgacgttcgacgcggcaacggcacgcaagtttgccgattatttcgtggaaggaaccacgggtcttcctgcgagccttgagagcaagaccattcctgatgaaggtgccgctcccggttctgatgtgatgaatgtgccggaaggctggtatctcatcactgacagcaaggacggggctaacttcaaaaccgcgctggtagcctccacggtgcagggcaaaacgaagttcacaaccgtacaaaccggtgaacagcaggctcttaatggcacgctgggcgctttctacgtgaagaacgagaacgctccgtcgattcctgagaagcatgcttacgttgacaatacgtatacgacgataaaaaccggttccgtgaatatcggtgacacgctgtactaccaggtgcgtacttccgtgccgaaggccgccaccggtcgtgacgattacaccatcacgttcaaagatgccgccgctaatggtctgaatattgcccaggaaaacaacatctccgtgtgtcacaaggccaagaccgctagtgacggggcggtttgcgttcctgttgacgctgcgaatgtgacgattacgcaaagcggcgacgctgctgccggtactgtcaccacggttgtggtttccggtgtctccgcatacgtcggtgagtatgtgtatctgcggtattctgccacggtgaccgccgacgtgctgggcaccgatggcactggccgtgtgctgcacaatgaggcaaccgtgcggcatgccgatggcgatgaatccgatgccggtgaagccaatctgtacgtgggtgatctgaagttctacaagtacgccatcgaaaacaatgcggaggtcaggctttccggcgtcgaattcaccgtgcatcgtggcgagtccgccactgctggcactgaaggcgacttgaagttctcgttggaaaaccctgacgtgaagggcgtctacaagtatgacccagttcagggctccaccaccgtctccaccggtgaaaatggtgtgctgctactcaaaggtcttgaggccggcaagtacaccttcgtggaaaccaagcccatcgaaggctacaccgaaaacttcaagccgacgttcactgtggatatgagtgtcgttccgaatagaggtatcgccgcaaacgctccgatgattcagaatccgctgaccgatgataacaacggttggaagcttgcatccgattggactgatccgaccgataactgcgaacgtgccaaggtgaagaacgtgaagtccctcacgcagctgccgctcaccggtggcgcgggcatcatcctgttctccgtgatcgcggcgttgcttatcgccgtcgcggcaatcgcgaccgtgcgtattcgcgccgtcaagcgcgagttgcaggcctgaaggttcccggctccgacctgtgaaggctgctccgattcgtgagcgctgatcgcccgagggcgatacgcaaagccattcggcaagcgtatcgccctcgtcgcgtatcaacgggctctacgtaacctcacatctcatgtaagggtccgagagatattgccgactgtcttctgcatttgccggaaggcggcatactgcatggacctagcacccccgacatctctcgatttgctgaatttcaggtaaaaaccgggcagagtgcgtgaatctgggatactctcatagagaatgccccgtgcgcgagaccaagcgaattcgtgcaggggaatgttgtcgggccaatcgtgaaggagcatgcccatgtccagttcgttcttcaagaaggcgttgatcggcggcgcagtggccgcaggagcggcggtgtgggccattgcgccgcgcaccttttccgacaagcgtcgcaactacgtgccggccattccggacgtatggtacgcccatcgcggtctgcatgacgccggttccggtctgaccgcgcaatacgccgccgaaagcggcgagtacgtggcactcgcccgccgcatggccatgaaggccggctatggcaatccgagcgtgcttggcgccatcgcgccggaaaactccctagcctctttcgctgccgcttgcgaagccggttacggcattgagctcgacctgcagatgaccgccgacggcgaagtcgtagtggtgcatgatgatgacctgatgcgtgttgcgggggatccgcgccgcatcaaggatctcacctatgacgagctgacccgcatcccgctgttcccgaccgacgctccgggtgcttccaaggccgcaccgttgccgggctctctcgagaagcctccgttggtcaccacgccggaccatgcgccggaaggctactaccagcatgtgccgttgttcgccgacgtgctcaaggtggtcgccggccgtgtgccgttgattgtggagtacaagttcgaagacaattccaagtgggatccgcgcgacgtggaactcatggaaaagggcgacgcgttgctgcaggcctattccggcgcatatgtggttgaatcgttcaatccggccgccgtgaattggtataaggaaaaccgtccggaagtatgccgcggacagctatcttggtggccggaaggcaaggacgcgccgactgatccggtggcattggccaaggagtatgcggccggagcgctggtcttcgattggatttcccgccctgacttcgtagcctacgattggaagggcggcaatagcccacaggtgcgtctggcccgtttcatgggcgcggtgccggtctcatggaccgtgcgcagccgtgacgagctcgcgcagtgcgtcgattggttcgaccaccacatctttgaggcgttcgttcccgacgagcgttgatgcaaggcccaatccagccgatcagggctggattgggccggcaatcagtcgattacgccatagaggcgatcgccggcatcgcccagacccggcacgatgtagcacttgtcgttgagcttctcatcgacggcgcacagcaccagcttgaatttgatggacgggtcgagatgctcctcaacgaacttcaggccctccggagcgcccaaaatgcacacggcggtgatgtctttggcgccgcgttcggccagataatgcgtggcggcaaccagcgtgccgccggtggcgagcatcgggtcgatcaggaagcactgacggccggtcagatcctccggcagacggttcgcgtaggtaatctgctgggtcggattctcctcgtcgcgtttcatgccgaggaagccgacctctgcggatggaatcatcttggtcatgccgtcaagcatgcccaggccagcgcgcagcacgggcacgatgagcggagccggagaggcgatatgcttgccgatcatcggggagaccggggtctcgatcggcttgtcgacgacttcgacgtcgcgagtggcttcgtaggcctcgagcatcacgagttcggaaacgagctcgcggaaggtggaagaggcggtgttcttgtcacggagaacggtgagtttatggtccaccagcgggtggttcaacacatgaatatccatgctttccaagattagtgcatgataacgaagaaatgcgccgaaccacgaaagcgcctgtcggcgcaaaggccgctcgcagcggcaaaaaatggagcccggggctatgcatggcccggcgcgaatcccattgtacaggcgtggaggacggggtgtgaacacgtgtcgcgttccccccgcaggcgttggatcgcttcggtttcgggcttgtgggttccactccggtatgacggcggcagttcgaggaatcctactccagtcgtccgcgccgccaaaggttcgcaccatggcggaaatccttggcggtggcaaacaggttgccggcggtgtgcagcagtcgtgaggcctttgcccgggcggttttttcggcatctccagcggattgcgctccgcgcgaagtcagtttcttcgcctcgatgcgcaatcccaacgcaaccacgtcggtaaaggcggcagcacgttccagcgcaacggcgaaatcacctgtaaaagcgccggccagaatggaatctgcggtgtgcgcgatatcctcttccgtcggggcctgatcgactccggcaatcgcggaagcggtcgtcgcaaccggctcgcccacgcgccacaaccgcgcaatcgactcccggttcttgcgcatccacgtacgtagcagatacagacgccacagaatgcccggcagtgaatccggctcggcgtggctccacagttccgcgatcacgtcaacgccttcacggtcgaccagcgtaagcacacgttccaccaatgccgcatcctgcgtgtgatgcacgcgatcaagcaaagccgccgccgaagcgtggctcatctcgttgatctgcgccggatccgcaccgcccgcgatattgtcggccatcatctggtcgagctggcccgggcgtgaggggcgtggcgaaccggtattcgtgaaaccggcggtacggctgggaatcacggaaccggagccgtagtgcatgttagtagacaagtggcgtgaccttttgaatatcgatgatgttgggaccttgcggtgtatcgattataaacattgcgacggccgtaccggtaggcatatagggagacttggcgatgagctgtttggcgagctgcttgcgcgagcacatgccacgcagatggtcgaacatgccgccgatcaccggtcgatgcatgcagatggccgtggtctgtcgcgtgtccaacgtctgcctgatctgctccagaaacgcgagccaggccatggtcggatgatcggcgaatgcgtcttccgtcaacgcgtcgatatgctccatcggccggtcggtctgccagctgaggacctgcagcgtctcctgacaacgcatccatggcgacgtggccagtcgggtgggattgtagcaggcgagctcgcggttgagcgcgaacgccgcggccgcacctttcggcgtgatcggacgattcgcgtcggtgcccttccatgatttgcgtgattcggccttcgcatggcgtacgatcagcagattctgcgcggttgcggcgccctcctgcacacggtcgacgaacgccgcgagaatgtccttatcggtggaatgcgtcaggatcttgcgtgcctcacgtaccgacacccacacgatatcgttgatttcgcctacgtccgcgcgatgcaccgggccgaatgcgtcgatgagatgctcggcgtcctctccggtgatgggacgtgccatccagtacagcgtgtgcttggtgtcgacggtgcggtcgtgcgaatggcgggtcttcttgccttcctcggacaacgggtattcgacctcgcccaagtacggaccgagcgcaatgcttacgcccgtctcctcgccgatttcgcgaaccgccgcatgacggtgtgattcgccctgctccagcttgcctttcggccagctccaatcatcatatttcggtcgatgcacgatgcagacttcaatgtcgtcgagcagttccttggctgtcttccgcgttgcgatctgaggattgtcggcgatttgcccgccgaccttccagcggtagacgataccccccgcagcttccacgatacgtctcatcttctcgctcatgcctttcattgtaagcgcgacgaaagtggccgactctgcgatgtgcagaatcggccatcttctgatggtccctcaacggaacggtgcgactcagtgcgttgccggacggcgcgtatggcgcttgatcaagtattcctggcagtcaaccagcgggcggccttcggcgtccttcgaatgacggacgtacgtgccatcggcctccatgtgccaggaggcggtggaatcggccatctgcaggtcgacgtacttgatcagctcgtcgatctgctccggtgcggtgatgcggaccagtgcctcgactcggcggtcgagattgcggtgcatcagatcggcggaaccaatccacacctcaggaccggcggccgggccttcgccgatctgcgggccgtcggagttggcgaaggcgtagatacggctgtgctcgaggaagcgaccgaggatggaacgcacgcggatgttctcggaaaggcccggaacgcccggcttgagcgcgcagatgccacgttcgacgatgtcgatcttcacgccggcctggctggcgcggtacagcgcatcgatggtcttttcgtcgacgatggagttgaccttgatcttgatccatgcctccttgccggcgcgtgcggcatcctcctcgcggcggatgcgctggatcaggccggaacgtacggtgcggggggccaccagcaggcggtggaaactcgacttcggagcgtagccggacagctggttgaacagacgggtcatatcctgaccgaccaccggatcgcaggtcagcagacccagatcggtgtagattcgtgcggtcttcgggttgtaattgccggtgcccacatggcagtagcggcgcaggccgtcggcttcctgacgtaccacgaggctcagcttgcagtgggtcttcaggcctacgatgccgtacaccacgtgcacgcctgcacgttcgagcttgcgggcccacgcgatgttggcatcctcgtcgaagcgggccttgatttcgaccaatgccagcacctgcttgccggcatgcgcggcgtcgatcagggcgtcgatgatcggcgaattgctggacgtgcggtacagcgtctgcttgatggcgagcaccttcggatcggcggccgcctgcgctaggaacgcctgaacggaggtagagaacgaatcatacgggtgatgcaggaggatatcgcgttcgcgaatcgctgcaaagatgtcttgcgcgcgggatgactccacctcggcgatctgacggttcgtagtcggtacgaaggagcggtatttcaggtccggacgatcgatgccgccgagctcgaacagtacggtcgcgtcgagcggtgccggcaggcggtacacctcgtcggcgctcacgcgcaactggtcggcgagcagctgggagaggaacgggctggtctcgtcggagatctccagacggatcggcggtccgaaacgacggcgcagcagctccttctccatggcgttgagcaggttctcggcatcatcctcttccacgtcgatgtcttcgttacgagtcacgcggaaggagcgggcttccttgatgatcatgcccgggaacagggattccagatgggcgataatcaggttctccatggtgatgaagccgtagcggacatcggtggtctcgtcatcggtcaggtcgtcgaccggcacgagacggttcaggttgccagggatcttcaagcgtgcgaagtgggacttgccggaggcggggttctctacgagcacggcgaggttgatggaaccgccggagatatatgggaacgggtgggccggatccacggcgagcggcgtcagcacggggaagacctgctggcggtagtaacgcgaaaggcgctcctgctcggccgcggtgagcttgtcccagctcagcagcacgatcttctccttggccaggtcgggcaggatgtgatcgatcatgtagtgcgcatgctcatcctgcaggcggtgggcctgctcgctgatggcgcgcaactgctgtcgggggctcaggccggaggccgccgtgacggcgatgccggtgtcgatgcggcgcttcagacctgcgacgcgaaccatgaagaattcgtcgaggttgtttgcgaagatcgcggcgaagctggcgcgctcgatgatcggcagatcctcgtcctgagcaagctcgaggactcgcttgttgaacttcagccagctcaactcgcggtcgaagaagcggtcgttcggcagcggttcttcaccggcctgcagctcccgcctgtcgttcttatcggtctcggcgatgtgctcagcaatctggctgcgcagaatcgcctttgagggtgcgtcaaaaatctgtgccatagcacactactttaagcggtgttcgtcgtgacattccacaaaacgacgcagaatttagccggagtttacattagtttgatggatttgcgaagggcacaccggtgaatgttcgattttcgattgggaaaaggggtgattgcgacgtgtcaggtggacttcggcgtcattcgcctgatggttggcgttccggcggttcgacgtcgccgtatggtgggttgcgtacgacacgccggagtacggcatgaagcgcacgcaatcgcacaatcctcaggtgagaatcgcacaagataatgcaaatctccgattatggcgatcggaagggaacagtttggcaaataacgcaacataggcccgtttcggtttgcatagccgccgatgctgagcataattacgaaatacaagaacaacttaacagagcagagcccacaaaaagtgtatgaccgagataggttgttacgttgaacgggcattggatagacttaccgttacaacgaggatgttgtgctgcgattctgctctgaagcttcttgtagagaaggcccgcttcggcgggtcttcttttttgttgctccttcgatatgattgctatgccgaatcagtggacgcgagtgtggaaagcgatgatggttatggtggctgccaggagtgagaaggaaccggaggagtctcttgcccatcctcggttggggcctgcgcaacggcgggagcagatcatcgatgctgcctcgcagctcatttcccgcaacggattttggggattctcagtgcgtcaggtggctgcgcaatgcgatctgaccgaacccgcggtcatctaccatttcaagaacaaggtcggcctgctgattgcggtgctggaacgtcgtgatcgcgaagatatggcgcagtattcgcattctcttggcgtggaacctgaacagatttggaatggcgatgtgcggttcggcattcgggatatctgcgatgtgctgatggcgcgcaatgccaagcagccggaaatcgtgaggttgtacaccattttgcaaggagagtcgctcagcgatcatcacccggcatatgagtactaccaaaagcgcgagcggcgtgtgattgcgatgctgacgcgtgcggccgagcatgatggtctggaacatcctcagcaggaggcatacctggctcttgccatgatggatggtgttcaattgcgatggctccgtagccccgaagacgttgatctgatgacgttgtggcgtgcctatgccgatgctcgctggtggtgatgcgtgttcggcgtgtcgtgccgaatgacgtgattcgccaatctttccgatcgctgcgtaagagcggcatgtgccgataattaactacgtagttaattcatgctatagtggtacttacataattaactatgtagttaattaatggcataccttggctcgatgatgaggaagggagaacctgatgacggcattcgatcaggcggtcgaaacaatccgacggggctcagatagcgcaactctcgccgcacaactctatggtgagctcaccgatgacgagcggctgaatctgctggacggtgacatctactactggcagggacgactggatattgtgcggcatggctacaatatcgcgccatacgtcatggggccgtgaatcggcttggcattccgggcatacggttcgtggatggtccccgtgggtgcgtcagcgggcatggcaccgcattcccggtgtccatggcacgcggcgcgacatggaacgaggctctggaggaacgcgtcggcgaagccatcggagaagaggtacgcgagcaaggaggcaaccttttcggtggcgtatgcatcaatcttccgcggcatcccgcttggggccgcattcaggagacttattccgaccaaccggtgctgctgggatcgctgggtgcggcgctgacgcgcggcgtacgccggcatgccatggcctgtgtcaagcattttgcctgcaattccatggaaaacgcgcgtttcaaggtcgacgtgaaggttgatgaggccacattccatgaggtgtacgggccgcatttcaaaacggtgatcgatgccggtgcggatgcggtcatgaccgcatacaactccgtgaatggcgagtactgcgggcagaacgcatggctcattcggcagacactgcgaaaggactggggctttaccggtatcgtcgcctccgattttgtatgggggctgcgtgatgtgacgaaatcggtgaaggcgggtctcaatatcgaggagccgttccatcaacagcggtacaccaagttgcgtgcggctctcggccgtggcgatgtgacctgggatgacattcgcgagcttggcgagcgcatcctcgatacgcaactgagattctatgcacaacgggatatgcgggaacccgccggaaccatggccggcgcggagcatgcggcgctcgcccgtgaagtggcggagcagtccatggtgctgctgaaaaacgatgcgcgggcactgccgctcgatcctgccgccgtctcacgtattacggtagccggcaggttggcggatgcggcgaacaccggtgatcagggctcttcgaacgtaagggctccgtacacggtgacgccattggaggggctgcgcacggcattcggcgacgatgcggtggattacgcggaaggatgcgaccccgcagaggctgcgcgtcgcgcacgtcatgccgatgccgcgatcgtggtcgtcggctacacggcgaatgatgagggcgaatacctcaagagcgtggtctccccggatatgctgccgttgctgccggaaccggtgactgcggaacaatgcgcggcgaagcaggcctgccaagcctacatgaaggaaggcgtaagcacgttcggtggcaatgcggaaggcggcgatcgcgcaagcctgcatctgaatccggaagacgtggaactcatccacgccgtcgccgaagccaatccgcgcacgatcgtcgtagtggtcgccgctggtgccgtgctgatggacgaatgggtggacgagcctgccgcagtgatgatgggttggtattccggcatggagggtgggcatgcgcttgccgacatcattaccggcaaggtcgacccgtccggacggttgccgtatgcaatcgcgcgatcggaacacgacctgcccccattcgaccgtgaggcgaccagtgtgcggtacacgcgctggtatggccaacggttgattcaacaccgcggttcacaagcattgttccctctggggtacggcctgtcctaccagtcatatggaattggggaacctgcgattgcggattccgatagggagcggcagacggcgatcctgcacgttccggtcaccaacgagggcggtcatgccggccgccatgtcgttcaggtatatggcagtttgcaggagggcgagcgcgcaggcgaacgtgaactgctcggtttcgcatcggcgtccattcccgcgcgacagactgtggacgtcgcaatatcgctggatttctcggcgctgggccgttggaatgcacaggagcgcaaagtcgcgctcgaaacaggaaaaatccgcatcgaggcgtcctcgttctggggcgatcccgatgcttcgacaatggaggtcgaactatgaatacagcacaaccgaccgtgtggacgggaacggtgagtgacgaacaacaggcaaaggtgccttgggtcgtcggagtggcgctcgtcttgggtgtattcctatggatgggaccatacatgggcgtaaacgtggtgctgctccccgcgaagacggcgctgctggcgggagatggcaaggcgagtgtcgtcgcagtgctgtccaccagcgccatgatcgtcgcggccattgccaatatcattttcggtgcgctttccgatttgacccgttcccgcttcgggcgtcgttccccctggatcatcggtggttcggttcttgccgcggcggccatgatgttcgtgagctgggcgccgaccgtaccgctgctcatcgtgggatggtgcgtatatcagtgcttcctgaacgccatcgtcgcgccattgatcgccgtgatcaccgaccgtacggcaccgaagttccgcggtaccatcagcgccatgtatgcgcttggctactcggttggcatctacggtggtcagatgatcggcgcccgattccttacggaccaatccatgggctttaccgtacttgccgtgcttacgctgatcggaggtcctctcgccgctctgatcatgcgcgaaggttccaacctggccatgccgaggaaacgattcaccgcgcagatgttctgggagcatttctccttcccgacgagacattgccgtgactactatcttgcattgttcggcaagttcctgatcgtcgcggccaagttcgccatctccggtttccagctgtacatccttacggattacatgatgcaaagcgccgatgaggccaaacactacgtttcggtgatttccatgtgcatgatggtgaccgccatcgccatgacggtgatcgcagggccgatttccgacaggatcggcagccgtaagattccggtgattgcatgctccttgctggttgccgtaggctccatcattccgttcttctccaacgatccgaagatgatgatcgcgtatgcattggtcgcgggtaccggcatgggcgcctacaacgccgtggatcaggcgctgaatgtggaggtgttgccgtccaaggacaccgccgccaaggatctgggcattctgaaccttgccaataccggtggccaggtgctcggtccggtgcttgccgccacgctgatcaatatgtttggctaccatgcgctcttcccgttggctgccgtctgctcgctgctcggcgcgctgttgatcgtcttcatcaagtcggtgaaataaaagccccggacgccatgatcgatgcttcgatcaatcaggatgcgggcggcgagacatggtcctggaagctgcggaccggtccttgccgcccgcaccctgacgcgttgcgtgggcagagtggcgggaggtggtcggtggacggcggtggatgacacgccgggggtgtggataacctggcgtccttcgaccacaggggtcggtttcgcttgcggattcaccgtcgaatgattttcaatcggcggtatgaacgctgtaccacccattcccaccgaggtgccgttgcctccgcaagcggcgacctcgcggcaacccatatcgccgcaacgtttctacactccgcccggagtggtcggcgacggaaacgatgacaccgttccgccgtggtctgaagccgattcgagcccgcctatgtccgtgcacggtaccgtggcacgcctgcatgcggcgcatccggtggcggagcatgccgatatggacggcgtggtggtgctgagctccgcagtcgccggtgtgggagtcagcacgttggcggccatgcttgcccgcacgctgacgcagcgtggcgtcaagtgcgtgctggtggatgcggacctgcagggtggcggattggatgtgctgctcggcatcgaaaatgaggatggttcccgattcggtgacatcaatgcgccgcttggcaacgtcgatggcaaggcgctgttgcgcgagctgccggtctgggatggtgtgccggtactttcctgcgatccatggaagatcgaaaatccgcaatggtgggagatccaagcctgcattcgtgcactcgcacagacacgcaggacggtgatcgtcgatatggcgaaccatatcggtcttgacagtctgaaggattgtgcgggagccttgcatatcgttgcggtggagatgacggtgctcggcctggcccgtgcgaaaacctggctgaagtcactcgtaacggttgacggcaatggcggatcctcgccgattctggtcggcatcgaacctcgcggcaccatacgcaatcgtggaaccactggtgttgccgaagcgtgcgagtatttggaatgcgaaatcggcatcgtcatacggtcggatggcaaactgtgcagtgcgctcctggaaggactgggattgcgcaagccgaacacgactatgcgcaaagccttggaacgattggccgatcgcgtacaggaaaggcgtggcggaaagcgggcggatcatggaactcggccctcttagcgaagtggcccgcgagccgggagtcaccgatatcgccgtgacctgcgacggttccgtatgggtggatggcggcgatggcatgcgattgcgcagattgcgtgtgccgttcgactccgcgcagtccattcggaatttcgcggtacgactatgttcccaacttggccgccgtctcgacgacgcctgtccgatagccgacgcctccaccgttgacggcgtgcgcgtgcatgccgtgatcgcaccgttggtcccgcaaggtgcggccatcagcatccgcctgcccgacgccaccgcaccccggttggaatccttggcgcaccacggcatgtttccgccggcttggctgccattgttacgtggattggtacgccgcaaggcgacgatgctggtcacaggcggtactggagccggtaaaaccaccatgctcaaggcgttgcttatgcaatgcccgccgacggaacgcatcatcaccgttgaagaggtgcgcgaactgggcatgttccatcatgccaatcatgtgtcgttggtcaccagagaggccaatgtggaaggcgtcggagccatagatctgtcgcaattgatcgcagcgaccctacgcatgcggccggaccgtgtggtagtgggcgaatgccgaggtgcggagatcgcggatctattgagggcgctcaactccgggcatcgtggtggcatgaccaccctgcatgcgaacagtgtggaagccgtgccatcgcgtttggtggcgcttgggctgctcgccggtctggatccgcgtgccaccgccgcactcgcggaaaacgctttcgatgtagtactgcatgtggaacgaacgcaaggatatcgcagaatctcgcagatcggtcaacttaccgtgcgggatggaaggctgcaaggcagccctttggcattttggaatggcgggcaggtgcgaacgaacgagcgatgggtggatttcatgcggcgatggggcgtatgagagcgtgccggtacgaggccgggcgatggcgagattcggaaacacacaaggagtctgtgatgaaatggttggcatggtgtgccgcagtgatggctacgctcgccgtgtggctatggctgcgccgccatgagccattcgggcaatcccgactgtcggacctgcacggatgcgtcgatggcggtgcaaaaccgaaggatcggacgccggcagggcagaggccgcgagccgatggacgggagggcagcgttgtcggcgagccgaccggaaacgcagtggcgagcgcgccattgccccatatggcaagcgtggcatgtgtggcggccctgcaggcttccgtacgtagcggcgccacgttggtgcaggctttcgaagaactgggaggctgcgcgtttgccactcctgaactcactcgctcgcgcatcgagatggtgttgcgatgccgttgcccgcccgaagaacaaggtggacagatgcgccgattgagtgcggaactttatgcggcctgccagctcagcatggcgttgggttgcgaaacgtcacgttgcctggctgcagttttggcctccctgaaaaggcaacgacttctggaagacctgcgcaggaacgcctttgccatgcctcaggccacggtcaaactgctgatggcattgccgttgcttacggtattgctgggcgaaggcatgggcgcccgccctttggccttcctgtgcggtgacgccaaggggctgttgtgcttgggatttgccttgggatgctatgcgatcggcctgctgtggattcgggtgttgctacgggagaatcatccgtgacggatcgggaatggtgggcgaaccgtagcggaggaagggagcggccatactgggatcgtgggcgattgcctccgcatgctgcacgtccggggccgtctggttgtggtattggagccctacacgggtgttgccgggtgaagaggccgctcatgaactgccgatgccgctggtgcttgaaatgctggccgtcgccattcgacggggtgcctcgataccgcatgcgttgattgtcgtggggcggattgtcggcggggattttggcgaaggactctcgtccgtcggaggtgcgctgaaccaaggcgtcgactgggatcaggcgtggccgtcaggcgatgacatcgcattggtgcgtgacgtcttcgccgcttcatggtcaagcggggcctcgccgctgaaccgattggatgccgctatcgaacagttggattgggatgagcgctcgcagatcgagcgggatgccgcgaaactgtcgattcgactgctcttgccgacgggattgtgttttctgccggcgttcattgcggtcggtgtcattccggcgatcgcctcctttcttggatgactgtggatagtggtggatgacacgccgagggtgtggataactgcccgtcctccgaccacaaccctcgcgtttgcggcataggcatcccggattccgcgacactgaagccacccggtcatccggtcgggccgaatcaaacgaaaggaacgcgatgaacgccgaaatgtcaatcaatgtcgatggccgtcccgacgtattggggcgggtgggtcgcagaatgttcgcactgcgagagcaggccgaccgcatggtctgcctgctcgatgctcgtatacggacgctgacgtccgagcccgaagagggggcggcaaccgccgaatatgcagtggtgttggtggccgcgaccggtttcgccgcggtgctggtcggcatcatgaaatccgatgccgtcaagacgatgctgaccaacatcatcaagaaagcgctcagtgtggggtgacggcccatgctgacctcatggtggaaacgccatgcggatgagggatccgccaccgcggaattcgcggtggtgcttccctccgttgccgcagtggcgatgttgatgctatgccttggacgggccgtggtggtgtccatggattgccaggatgcggccgccgtcgcggcgcatgcgatgacgattgccggtcgtgatggtgaatcccgtgcacggagcgccgccttggcggctgccggtaatgatgcgcgggtgtcgttttctcgaaatgccgacagcgtcacgatcaccgtgcaatgcccggtgattccggatccggtcggtgtcctgccaacgcgcgtgaccgccaaagcaacccgatatctctaggatttgcgcggcgggattgccgcgtacgcaaggagacggagatcgtgaaacagtttgtgaaacaatggtggacgaccagatgcgggcgattcatgcggctattcgcaaaggctgatgaaggttccggcaccgtatccggaatcgccctgattgcggcaacggcggtgatgctgggtgtcgtcgcggccgccggcaatctgctgatttgcctgcatcgggcgcaacatgttgccgacctggccgcagtggcttcggcgacggcgctgcatgaagggtcggcagtgccgtgtgaggtggcttcgcgaacgacgcgcggtaatggtgccgagctgcaatcctgcgaaatcatcggagaagatgcacgaatcacagtcgcagtgggtacgaacgtgccgtttgcgtctcaggtgagcaaatcctcccgtgcggggccggtcgcatgcgagtaggagtgcgtttggcccgcatgcccgtggcggtgatgcagtaggccatgccgattgcgccaaatcgatatcgctgatagcgtgtggcggtcaaaggcggttatcgtaacggtatgaacgaatcgtcacattcgaatatgaccgttgccgtggtggggaacccgacatcgaacaaaggccatggagcaaaaaccggtgaacaggtgatcagcctgctgcaatccgccggggacaggcacggtttcgaagtcatcgatgtgacgggcacgagtttcgaggactccttggttaaggcgaaaagtcgtcgggacgaatacgactatctggtggtggtcggcggcgacggcatgatcgcactgggtacgaatgcggtcggttgcagcgacaagccactgggcatcgtagctaccggttccggcaatgacttcgcgcgtggactcgagctgccggtcaatcgtgtggaaaccgccgtcgacggcatcgtcggcgccatgatgcgaggttcgcatatcgacgtggacatgggtctggtcacatcgttgccaggtggctatgcggtcgattccagcaccggtgacgaactgccgagagtgcaggaagcagccgtcaccgcacataccgtacgaggccttctggccgttgatccgctgcaatcgaacatgggactggatttcaccgacgaatacctaggcgagccgaacagcctcgatatcaaccgttactatgcgggcatgctgtcgtgcggtctggacgccagcatcaacgatcgtgccaaccattcgcatctgccgaacggtaccctacggtattttgcggccgtgttggtggaactgacccacatgaaacggtatggctaccacatcaaggcaacgcttgccgacggttcggtggacgagcgtgacatcatctctccgctgcttacggtcgccaattcgcgacatatcggcggaggcatcgaagtttcgccgtattcgcgattctcggacggtttgcttgatctgatatggatggatcatgtgccgaacttcgtcgaatgcgcggaggccatctcgcacgcctacaatggcaggcttctcgccagcaaggtatttgggtggcagcgcattcgcgaaatcgagatcagtcgtgccgatgacggtgacgagccgccggtgttcatggccgatggtgaatacatcggccatctgccggtcaaggtcaccgcgcaaagccgggcattgcgtgtgctcgtgccgccggcggtcgccgaggcgcaggctcgtgacggcgaagagcagacgctcgaagccattgcgcgtgaccatcgtgaccccctcaccggaaattttctcgattaggaaggcttgatgggtatgccgatagcgcctgccgcccgcggaaccggaatatggagacacggtatcctgtgaacagggagaggttccggacggtacgaacgaagaggtgagtggatgttcacggtggcggtcgtcgaggatgaggccgatgctgcgcgcaggcttgaggcgtgtcttgcgcgttattcgcgggatcatccgggtgtgcggttcgatgtgacggtgttttcggagccgacgcgtctgcttgaggggtaccggccggtgtgggatgtcgtgttcatggacatcgagatgccgaacatggatggcatggccgccgcgcgcaggcttcgggcccttgacgggcaggtcgccctggtgttcgtgacgaacatggcgcagttcgcggccaaggggtatgaggtggatgcgttggattacgtcatcaagccgttttcctacaacgacttcgaacgcaaattgacccgtgccgtcaaactctgccaacgtgactccgagtccatcgtcatttcgcagcgcggaggcggtcggcgggtcttattgcgggacattgagtatatcgaagtcaaagggcgcaatctcgactaccatctcgatagcggcgtgatcaccgcgaccggcagcctcaaagatcttgaacaaagccttagaccatacggcttcctgcgctgcggcaatccatatctggtcaatcagaaagccattgtcgccatcaaagggcagaccgtcactatggccgacggtacggaactgaccattggacgtgccttccgcaagaatttcctggccgacttggcgagtgaacttggacgtggtcaccttgcctgacctgttcgcggtgctgaatgtgttgaacgatgcggcgctacatggagtcatgccgtttctcaacggtttcatcttcgagctgctggcctgtactgctgcattcgtattctggctggatcgcaggccacgatttacgctacgggtcatcgtatcggtcgtgtgcgtcatcgcgattgcggtggcaacgtacatacccatcgtttgtctgagactatacgaacggcctgcggacggcaatgtcggtggcatgagcggcgatattcagggcatttggtttgtcatcggtcgtttcttcctgctgtacgtggcctgttatgtgctgattcgcatctgtttcgccgttaccgttaagcagggcgtgttctatatcgtctccgccgtagctctgcagcatttcgtctactgtgatacgcgtatcgtcatgctgagtctgcctgacgaatggggaaatgtcgagtactggccgggtgcgattatgtttctcgcgctgaccgcactgttctatggcataggctgttggctgttcgccagaccgcttgtcggacggctgccggaaaccgtcgtcggaggcattctgatgatgttcgtcggactgttgctgtgcgtcaacgtgttctcttgctggttcgaggcgttgtccgagcgggatgcgctttccggcggttcatatcagatgatggtgctcacccgtttcgtcacatgtgcgttcgtgttggccctgcttgcggaaatcgtcaaacgtgagcgtgcggagcgcgacggcatcgtgctgcaacagttgctcaaccaacagaagtcgcaattggcgaatgacaaggcgaccatcgacctcatcaacatcaaaacgcacgatctcaaaaagcaactgggtctgctgggcggtcgcatcagccaggaggagattgacggactcaaccggttggtcagcatctatgactcttccgtgcgcaccggcaacgaaacgctggacgtgctattggccaataaatccttgcaatgcgagcaacgcggcatccgattcgatcgcatgatcgacggtgagcttttggatttcatgaagcctgccgacatctactcgctgttcggcaacgccgtagacaacgccatcgaagcggtactgcgactcgatgatgacgctgaccgctacgtcagcatgacggtatgcaaacgtaaggagatgttgtcaattcatattgagaacccatatgtcggcgaattgcgttttgacgatggcctgccgcagaccacgaagcaggacaaggattaccacggcttcggcacgcggtccatgcgtatgatcgtcgatcggtacgacggcgtacttacgattggggccgccgatcatgtctatacggtcgacgtgctgatgcccctgccggaatacgtctgatgcgtcattgatcgattgcgatggcagatgccatgtaatccattacacgaaacatgtcgtttatccatattgggttgaacggtgaaccctgttccgggatgctgaagtcattcacctcaccgaagaggtgaaacagtcggaggaagggtaccatgaaccgaacgaagaagagggccctgaccgtgcgtatcgtgaaaacggcgatttccgtggcattggccgcggtgattgtggttgcgatggtgctggtcaacccacagctgagcactaataaactcatctccagcctcatgggctataaccatcaaagcgttgataacggcaatgccagtgccggcgacgccgatacgaattactatacggccgactacaccaaggagaacattcgcaaagccgaagacaagctgtacgaccagattgcctccgaaggcaccgtgctgctcaagaacgacgacaacgaactgccggcccaaaaaggtaccacgttcagtttcttcagcgccaacagcgtggatggcagctcgttgacccaaggttatttgggcaccccggaaacggtgaccctcaagagcgcgttcaccgcggccggcttcaaggtcaacgagaccctgtggaactattacgaatccggcgcgggtaaggactacggtctggccaccggttccgtaaactacggcgatggtgaggacttccgtatcaatgaggctcctcttgccgcgttgaggaaggaatcgggcctgctggattcggtgaggggcacgacaccggtctacgtgctcaaccgcgtggtcggtgaaggccgcgacatgccacgctccatgtataaccatgccgacaagcaggaagacaaggagaagagctatatcgagctcgattccaccgaaaccgaaatcatcaagtacctcaatgacaactacaaggacgtgattctgctcgtcaaatccagcgcggccatggaactcggctgggttgcggactatccgaacatcaaagcggtcgtctattcgcagaatgtcaccaacgcgctcgccaaggtattctccggtgaggtgaatccctctggcaagacggtcgatacgttcgccgccgatgcgctcgcatccccggccgcgcagaatttcggcagctaccagtattacgacgggaacggcaatgccaccaagtacaactacgtggactatgccgaaggcatctacgtcggctacaagtattatgagacccgttacgaagacaaggtgctcggccaaggcaatgccggcgattacgattacgccacggaagtcgtgtacccgttcggctacggtctgagttacaccgatttcaagtggtccgatttctccgtggctacggacggcgatgatttcgtcgcgaccgtgaccgtgaagaatacgggtgatgtagccggcaaggatgtcgtggaactgtatgcacagacgccgtacaccgactacgacaagcggaatgccgtggaaaaagccgccgtgaatctggtcggctacggcaaaaccgccgaacttgaaccgggagcctccgaaaccgtgaagatcaccttcggcaaggatcagctcaagtcgtacgattacaagggcgcaaagacctacattcttgatgctggccagtaccgtttcaccgcggcttctgacgccaatcaggccatcaacaacattcttgccgacaagggcaagggcatggccgacggcatgaccgccgaaggcgacaaggcgatggtatccagctggactccggaaaacaccgacgtggacaccaccacattcgcgactgatgacgctaccggcaaggcgatcgccaatctgttcgatgccgcctccgatccggaagtgacctatctgacccgctccgactggaccggtaccttcccgaagcattacggcgaatcctccggcgaaatcaacacctggggcaatgaaatcaactgcaaggactccgatggcaacaacgcgtcctgcacatggaagaagaccgcttcggacgagctcatcaagcagcttgacggcaacgattccggctccaccgtagataagtccaccatcaccgatacccctacgttcggcaagagcaacggattgaaggtgtccgatatgcgcggactggattacgacgacgagcagtgggacaagcttctggacgagctcactgaggacgactacaaccagctcgtatacttctcgggttatggcgtggactacatcaaatccgtggagaagccgttccaaaccgacgccgatgcggcgaccggctggttctatggcggtaccggcaaggcgttccccagcatcatgatgcttacacagacttggaatgcctcgctggctgaggatcttggcgtgatgatgggcaatgaggcgctgctcggcggcgcgaacggctggtatgcaccggccatgaacattcaccgcactccgttctccggccgtaacggcgaatattattccgaagacggtttcatgtccgggtccatggcctcgctggaagtcaaaggcgccgccaccaagggcgtatacagctacatcaagcatttcgcgcttaacgatcaggagaatcaccgtggcgatcgtcccggcaacttctctgtggcgacctggtccaacgagcaggccatccgtgagacttatctgaagccgttcgacatgtgcatgcacctaggtgacatggatatgaagacggtggtgaagaagtccgacggcacctatgagaacaagaccgttacgacaccgatcgccaaaggcgtgatgacctccttcaatcgcctcggcgccacgtggaccggcggcaactatgcactgattcagcaattgttgcgcgatgaatggggcttcaacggcctgatcatcaccgacaatgccaataccagcaagttcatgagcccatatcagatgctggaggcgggagcggatatcaagctgctgaacgtcagcgaggatccgaccggagaacagctcgatttcaatgatgccgcgacctaccactatgcgcgtcaggccatgcatcacctgctgtatacggttgcgaactcgaactgcatgaatggtgcgctgccgggtgcgggcttcacgttctacaaccagatgaaggtcatgcagattgcgttcaacgcgatatgcggcgtgattctggcactgctcgccttcttctccgtgtggcgctggctgccaggcacaatcaaacgtgtggcggcccgtaaggaaacacgtgcggccaagaaggccgctcgaaaggcggcgaaggcctgattccgaatcggcctgaacctcctccttgataacaagcaacggtggacgatcctgcccctacggtcgtccaccgttgttcgtttccatgctttcggcgtaggacggggcgaaagacgttccacggccgttttcggatgcggtattgtgtttcggaaggaatgacaggcgaacgaaggagcgctttgatgttcacggtggcggtcgtcgaggatgaggccgatgctgcgcgcaggcttgaggcgtgtcttgcgcgttattcgcgggatcatccgggtgtgcggttcgatgtgacggtgttttcggagccgacgcgtctgcttgaggggtaccggccggtgtgggatgtcgtgttcatggacatcgagatgccgaacatggatggcatggccgccgcgcgcaggcttcgggcccttgacgggcaggtcgccctggtgttcgtgacgaacatggcgcagttcgcggccaaggggtatgaggtggatgcgttggattacgtcatcaagccgttttcctacaacgacttcgaacgcaagctccgccgtgccgtggccattcgcggtgaggaatcggcgtccgtcatgatcatgcaacgagccggaacgcaacgtgtgctcctacgcgacatcgagtatatcgaagtcaagaatcataatctgctctaccataccgagcgcggcattctgaccggtaccggcaccttgcaggatgtggaagacaagctcggcgaccgtggattcctgcgctgcagcaaggcgttcgtggtcaacggtcgtcatgtcgtcgccgtcaaaggcaacgagctgactctttccggcggtgaaaacgtgaccatcggcaggacatacagaaaggccttcatggtggcgctcgccgcaagcatgggcgatggcaatgtgatgtaaaggcatattgcagtgtgacgcgggtcaacggaatggatgaacgatggtgcaggcgatcgacgtgatactggctttcttcaccgacaatggcatggtcgtggagctgatggtctccacgctgctgttcacctggtggttggaacgccgtgacatgttctggtggcgtgcactgaccggtgccgccgtgatgcttgtcgaatcgatgctgtggcatggctatgtgccggagaacctgtggaccgtcaccgtgcagaacatcatcgtgttcgcattattgatcgcgtggatcggtgaatgctggaaggtcaacatccgtcaggcgttgttctacttcgtcatgtccggcgccatgcagcatctcgtctactgcggtgcacgtctgttgtcggtgggcctgcaccgttgctggccggatggtgcatggatcgatacttatgcgtattcgttcgtgcagatcccgctctactgccttgcctatgccgtattcgcccgaccgatggcgaaaaaggacatttcgatggtgggcggtcgatcggtgttcgccatgatggtcggcatgatgctgtgcgtcagcgtattcaccaacatgttcaacttcctcgcctcgccggcatccggcgcggcggcattcaccgtgttcagcttgttcgatttcgtcacctgcgtgttcatgctcgaactcgccatcgaactcgtctccaaacagcgcgcccatgcggaaggggaggtgctacgtaatctgctgcgacagcagaagcagcagatggaaagcacgaaggagaccatcgatctgatcaatgtgaaaacgcatgatctgaaaaaacagatcgtgcaacttggccccgccatctcgcaggagcaggcgggcgagctgcagcaacttgttgaaatctacgattcttccgtgcgtaccggcaatgagacgctggatgtgctgttggcgagcaaatcattgctttgcgaacagcgcggcatatcgtttgaccgcatggtcgacggcggtctgctcgactttatgaaaccttccgacatctactcgctggtcggcaacgcgctcgacaatgcgatggaggcggtatcggcattgccggacgatgcggagagatacattgccgtgcggatatgcgagagcaaggggatggcggtgattcgcgtcgagaatccgtttgccggggaacttgcgttttccgacggattgccggtcaccaccaaaggcgatacgcaatatcacggtttcggcacgcggtcgattcgtatgatcgcccggcaatatcacgggtacatgtcgatttccgcgcgcgacggcatcttcagattgacggtgatcctgccacttcagtaacgccgtctgcaggccatgcgcggactgcggtgtcgttcggcgcgtttcgtcgaccgttcacgaagtgacgcttatgcgccgccgaatgttcaagcacactggaggcacgggattttcaccgtcgaagattcctgcagagatgctgaaactcaaggagtaagagatgcatgagcgtacaggcctgtggcgcggtatcaccgctgtgggcgcattgcttctcgccgtcgccatcatggcgggaacgatcatggagacgtaccgtacgtcccttgacgcgttcgtcggtaccagaagccagagaaccgtaacggaccagtccgccgacaacggcgatagctggacgtacaaatccgaatacaaaaccgccaaggaagcgtacgagggctttaagaagacggccatggacgaggcgcaggagacctacgcgctgctgaaaaacagcgataacgccctgccgctttccaagagcgcgaaaatcaccatgttcggcgtgcgcagctatgccccggtatatggcagctccggcggttccgtgaccgacggcaattccaccgtcgaaatcaccaaggcgttcgaggaggaaggcttccagatcaatccctccatgctcaaggcctatcagaattatttcaaagacaagaaatggaccaccccgcagttcggcggcggcatccttcccgaatatgaggacatcaccaagtacaacgacccgtgcgagctgagcctcgacgaactggccaagctcaatcccgaatacaagtcgcaatacggcgaatatcaggatgccgcaatcgtggtcgtcggccgtcccgctggcgagaacggcgacggctactatccgggccaggacggtctggccgacggcgtgaataccgtgaccggcaacatcctttccctgagtgatgaggaaatggcattggtcaacgaggccaaggccaatttcagcaaggtgatcgtactcgtcaactccaccaatccgatggagatcgccaacctgcaggacgatccggacatcgatgccattatgtggataggctatccgggcgcatacggtttctatggtgtggccgacgtgctcaacggcacggtttccccttcagcccacctgggtgacgtgatggccaagaacagtgccgtcgcgccggccatgagcaactatggcaacgtggcctggaagaacgcctccgacttttccgaagatgcggccgtcaactcctatctgatggaggccgaaggcatctacaccggttaccgctactacgaaacccgttacgccgacatcgtcatgggcaatggcggtgatacggcttcggccggaacctatgccgcttccgacggcacggtcgcgactgcggatggcatatgggattacgccaacgaagtggtgtatccgttcggctacggcctgagctacacgacgttcgaacagaagcttgacggcgtcgaggtcaagggcgacaagaaaaccgccgtcgccacggtcaccgtgaagaacaccggttccgtggaaggcaagtccgtgatccagctgtacgcttccgtgccatacaccgattacgacaagaagaacggcgtggagaagtccgcgatccaactcatggatttcgagaagaccaacgccctcaagccgggtgactcgcagaccatcaccatgacggtggacttgtcaaaccttgccagctatgactcaaacaaggccaagacctacatcgtcgatccgggtgactactacttctccatcggcgacgacgtgcatgacgccctgaacaacgtgcttgccgcgcaaggatactccgaatccgacggcatgaccgccgccggagacaagaccaagacctatacgtggtcgtgggacggcgacgtcgatgccgataccttcgccacctccagcaccggaaccaagatcaccaaccagctctccgacggcaagtacgccaccgattacaacgcctttgacaagggcgcggtcacgtatctgacccgttccgactggaacggcacctttccgaagacctactccggcatcagcgccaatgaggaagtctccaaactgctgaacaacgatttcatcgacctgaagtcggacggcgacgtctccgacatcacgatcggcgacacctcaagcagcctgaccctcaacgatatgaagggcgcttcctacgatgacgagcgttgggacgagctgaccagcaaggtttccgtcaaggagttcatgcatttcgcggagaccgcgttccacgccatcggcgcaatcgattccgttggcctgcaggaaatgaccacggatgacggtccaggcggatccgactcccattatctcaatgagggtcaatatcaggggaaggcctatgcggatgccgacgattacgccgacaagagctcccgagtggctccttctcccaccaacctggcctacagctggaacaaggagctcgcctaccgcaacggcgaagtgattctgggcgaaagcagcctggtattccgtctgccgatcatgatcgcaccggccatgaatctgcatcgtcacgcctataactcccgtggcgtcgaatactattcggaagatccgatcctatccggatacatcggctccgccgtggtgcagggcgcgcagtccaagggcgtgctggtgaacgtgaagcatctcgcattcaacgatcaggagatcaacaggtccggcatagccacgttcatgagcgagcaaaaagcccgcgaaatggaactacgcaacttccagcaggccttcgaagccaacggcaagccggcttccttcgaatccgacgatgccaagaaaaacacctacacccaaggtgcgctcggcgtgatgacctcctacaaccgcatcggtgcggtcgcctccagcgccaacgccgcggtcatggtcaacatcctgcgcgacgagtggggcttcaccggctacaacgtcaccgacttcacctcggtctcgccccatgcggcgccgaaggaatccgtgctcgcaggcacatcagccttctgcggcttcggcaatcagggcgtgaagtattgggatgccgccacgctgagcaaggaccgtgacatgctcctggccatcaagcagaacatgcactattcgctctgggccatcgccaactccaacgcgatgaacggcgtgaactccagcacacacaccgaaaacgtcatgacgtggtggcgtgcggtctatctcggcgtgatcgccgcctccggcgtggtcaccctgatcggcctggccggttatacgacgacccgcatccgtcccgcccgcaatgcggccaacggtccgacggcggcttcgaagtgaaaggaacgatcatggcaacgacaatcaaaacccatgtttccgagcttgcggccgcagcggcgacgctcatcggactgatggtctacctcgtcaattcgacgaccggatacatggccggccaaggattgagcgcgctggtcatcgcgctgagcgtggtggcgatcgtggcgctcgccgcccgtgcgttcgcaggcaaccgtctatcggcggtgctgaacgacgtactgctgatcggagccgaagtgctgttactggtgagcttcgcgcagttcgtgcttgaacgcgtgcgccttgccgccgacatctacttcattccggttaactatccggcatcggagcagacctcgctcaatgtcgcactgatcggtgtggcatgctacctcctggccatcctcctgctcgtcgtcaaggcgttcaccgccaaggacgcgcaacatacggcggtcatgctggagccggccgccgaataacgaccgtatgccgttcgcatgggcggcaccgccatcaggccatccggcggcgagcgccgatcgcagtgattgcgattcgcaaagacgtcgccggtggctatgccatacgttgcaatttcagaggagattttaggaatcatcatgcaggcagcagatttcaatgcaggctgggcctatcgccatcttgacgccgatgaggattggaccgccgttacgattccacatgatgcgatgctgtatgagccgcgccatgcgctcgcggcaagtggattgaattccggctggttcgaaggtcgcgattatgaatatgtcaagcatttcatgccggaacgggatatggccggcagtcggatgttgcttgaattcgagggcgtctatcatcatgccgaggtgtgggtgaacggtgagaaggtggcgtttcgcccatacggatacaccaatttttacgttgatctgaccggccgcgttcgtttcggtgaagacaatgagattcgcgtgattgcacgcaatgccgatcagccgaattcccgttggtactccggagccggtatctaccgtcccgtcacgttgtggacgtcgcccgccgagcatatcgccgtggacggtctcttcgtgcgtactatcgccgcggatccggcgaatggcaccgcacgtatccgcgtcgaggtcgaaacgactgcggcaggcagtgtgcacattgaaatcgccgacatggcgggtgggatcgcagccagtgtcacgcaaccatgcgaggctggggtaaacaggtatgagctcggcattgccgacgcgaaaccatggtccgtgaaccgtccggaactgtacgtgtgcaccgcgcgttacaccacgcaacatggggattccgacgaggctgcgaccacgttcggtatccgtacgctcgaatgggggagcgggggactgctgatcaacggcgagcgcgtgatcatccagggcgcgtgcatccatcatgacaacggcgtgcttggcgcatgcgcgtatgccgacgccgaggagcgcaagattcgtctgatgaaggcgaatggctacaatgccatccgttccgcgcacaatccgtgttcgaaagcactgttggaggcgtgtgaccgacttggtgtgctggtgatggatgagtatatcgaccattggtatattcataagacgcagcatgattacgttgattatttcgacgaatggtggcgtcgtgatcttgccgacatggtgatgaaggatcgcaaccatccgagtgtgatactgtactccaccggtaatgaggtgtcggaaacggcgcagaagcgcggtattgcgctcacgcgtgcgatgactgaatatctgcatgcgcttgacgactcccgtcctgtcacctgcggtgtgaacatcttcttcaattttctttcgtcgatcggctttggccagtattccgacaagaaggccgcgaaggaggccgaggccgccgagaagcgccgtgccgcaggacaggtcgccgacaagcataaggctgtcggcagtgagttcttcaacaatatggccggcgtgctgggcgccgatttcatgaagaccggtgctgcgctgccgttttgcgattgggtgacgcgagatgcgttcgccgcgatggacgtggccggctacaactatggcatcaagcgatatgttcacgacctgaagaagtatccggatcgactgattctcggctccgaaaccttctgcaacgatgcataccgcttccgcgagctcgccaaacgcgaaccgcggctgattggcgacttcgtatgggcgggcatggattacatcggtgaaaccggcgtgggggcctgggagtacgaggattatgcgaccttgaatatcgaatacggctggctgaccgccggttcgggacgggtggacctgaccggccgcgcattgggtgaggcatattacacgcgtgtggcgttggaggaggcttccggaccatggttggctgtctgcccggtgaaccatacgggagacaagcattcgccgagcgcgtggaagatgagcaacgccatcgactcgtggagctggaatggctgcgaaggccgcaaggcgaacgttgaggtctacgcgagggccgcgtccgtctccttggtgctcaacggccgtgaaatcggacgcaaggcaatgcgcaacgattgcatcgcctgtttctcatgcacatacgagccgggcacgctggaagccgtggcctacgatgaatccggccgtgaaatcggccgcaatcagttggtcagcgcttctgccgaaacacgattgagcgcatccgtggaatatacgggtcgtgaacttgcgtacgtgcgcgtgcgctacaccgatgagcacggcgtgaccaaaccacttgagcgaggcacgttacgtgcgacactgatcggtcccgacggcaagggaggcggggccggcggagacactgacgaagctgtcggcggagcgaaactgctcggtttcggttgcgccgcaccttgcaacaagggcagcttcgtcaccggcgaaactggcacctactatggcgaggcgctcgccgtggtgaggatgccgcagtcgcaagaaggtacggcggtgctgcacataagcgacggcaggctatcggcgcaggtgagcgtcgagccgatcggcatcgtgaatcgtgcggattcgacgaggtaggagggatgatgcccgaacggactgaaatcatcagtgggcacggcggcggtccgattgccgtgtggtggcggcgcttcgtggcgaagcataggctgatcgcgcagttcgtgatgttctatgcgttctcactgttcgtcaccatactgcagtacgtgatgctcacgttcctgcccaacctgttctacgcgaacaccaactggtgcgatataccatgccaactcatccatctggctcttggaccggtcgatacgtacgtgttcgactatccggtcaccggtgatgcgacgggcggcatggggtatttcgcggcgttcgccatcacgctgttcatggcgcagtgcgtgaactttccgatgcagcgcaacatcacgttcaaatcacatggcaacgtgtggttccaaatagcctggtatgtggtggcgttcgtgctcatcaccattgtgtgcagcttcctgatgggcctgtatgtgccgttgtgcaagcggtttttcgcgccggccgtgtacaacatcctcattaccgtcatcaatggcggcgtgcagatggtgatttactttccgatctacaagatcatctttccggaaggtgaggcgaagtaaccgattcgacggtcggtgaaggtgccggatatggcgtccgtctatgtgcaccggaagcttgtagcggactgcgaaaggactgtacccgacgctttcgccattgacaaggcgaagttcgggtacagtcgtcggattggcattatcgccatgcaggccgcacggttcaggccgccagatcttcgcggcgggccatggcctgctcaaagtccttggtgcccgtgaacacctcctgcagccacgggttcacgtgctgcttcctggcacggtacatgatatagccgaatgcgagcacgttcgccacgagtgcgatgatcgacacggtcaggttcacgttcgggttgttcaccgactgcacggcgaacttggactcgtcctggaaggcagggaacacctgcgcgaacatgcaccagatggcgagtgtgttggcgcggttctgaatccagccgcccttgttccagaagaagttggcgacggtcggtgcaagcagcagcgccagaccgcaataccacgagtgggtgggcaggcagttgtaggtgtagcagaagttccacaggtcgtaggctacgatgaacacccacgtcatgtcgggccagagcatgtcctgcttcctcttcgacacgtagatgccgaaccatccggtcatgcaggcgatgttgatgaggcccgccacgccgttgaacacgttgtgccagccgcccatgagcgtcacgccttcggtggagacccaggtggtgccccatgcgcggatcgcggattcgaagtcggaaaccacggcgatgaggatgttgatggccacgattacgaacgggaagcatttgaaccattcggatttgccgatggcgccccacttgtacttgagtgccatgaagccgatgcatcccgcggtcgctgcgtacagtttcgcataatggaaccagctggtcatgtgcacgtaggtcgggttggtcagcgcccattcggcgccggcggcagcggctacatagatggtgatgaaatagacggtcaggatcgcaggaacgaccaggaacgccacgataccgccggtcttggtgcggcgggccagctcattggcaccgatcaggcagcagaagacaaggatccagccgatccactgatatacggcggtgtcgccatagacttggaacaacatcgcttttcctttcactcgggtacatgcgtgagtcccgctcactcaatgtacgggtccaggtgcagcgtctgcgccgcaacctgtctgacaacggtgtcatcggtgtcgggatgcaacctgatcagtgaaatcaggccgacgatcagcgtgtagaaggtctcatgcacgttacggatcggcatgccgtgcaaccgttcgaaatcacgcacggttgaggcgcagatgtattcggcgatgcgatcggcggcgcggtcgatgaacttgatgtacagttccgcgttgccgtctgcgatcatgcgctgactgaacggtccctcatcgttgatgaggccgcgcgtcaggcgcaccacgtcgtcgagtgctttcgagatgttgcccacttcgcggttgcgattccactcctccaaaacggtgatgacctcatcgatgacgtcgtccagtacggcgtcggcgacctggtccttgtcttggaaatagtgatagaagagcgatcgggtcatgccgacacggcctgcgatatcgctgaccgtaatcttcgagaagcctttttccaggcagatttcgcgtgccgcatgcacgatttgcgcgcgacgtgcgtctcctgccgttgcaacggaaatctggttccgtccgttcattgcgctctcctcacgttgagtggcggtcccatcgatgcgacacgttgacactctgtcaattttttgacgcgaccaagtctaagcccaatattgacacagtgtcaaaccgaggtgggtcggtgacgctcacatggcgattactggtatgacaacaggttacgcaaccgtcggtcataggggtcgtgcggcgtctatcggcgtgtcatgttccgcttctgaaacgggccggcgaaaccgaccgcgccatcttgaacttgcgtgagaagacctcgaggctggaaaagccgcaggcacgcgccacctgcgccacctccatgtcggtcatgctcagcagatcgcaggccttagcgatgcggatgttgtcgatatagtccttcaacgtcaaaccggtcgcgcttttgaatcggcgggacagatggctgcggtcggtgtgcagtgcctctgccacacggcccacattgatggattcggcataatgttcggcgacgtattgcgctgcggcggtggcgagcgcaccgccggcacccgcgtcatcaggccgtgattgcgtggtggcgccacccgccgtcgccatggcgagcgccagccggtgcaggaactccagggtgatggcgttgagcttgatctcgtcggcgaaactgccggatgtgtagtcgaaacaggattgaatcaacgccaggaacgccgaggtgtcgccgacatggaacgcgttgcggtcgtgggccaggccgattcctgccaggcatcgttgcacgccgttgccgcccagtcccagccataggtaggtccagggatcggttgcgcaagcctgataggtgaccggcgaatccggccggatgatgaacccgtcgtgggctttcagccggaataccgcgccttggctgtgcaattcgccgctaccggacagcaccagatggatgatggtgtgatcgcgcagtgccgggcctacgtcgtggcccggttccgttctcgagatgccgcagaacgcgaacgatacgccattcgccgatgagggcgggtccgtatggcccgatgtgaacgggcagaaggagggcaacgtgtagacctgtgcgtgctccatgtcgcctccctgcggtctcaatgcgccggccgaccggattgccggccgtttgaagacagtagaagacagtataggcggacctgccgtgccggccaccggtcggtcgccggtcgactgactggccgacagccggcagcgacgctcagtcggcggtcagcacgaacaaccgtgatgagaagtcggtggtgacgcccagcgggttcacgtcatccatctgcccgcaggaggcatcggaatcgaccagaccgatgcgcatgagttcggcaccggtgaacgacctgccggcaatgctggaagcgccggtgcaatccaccttatatgtcagtcctgcatccaaaccgcgcaacgcaagtcgtgtgaacgcaccgttcggcgtgatcagcagacggtaatcgccgatgatcgcggtatgccgatcacgggaaaccaccatccaggcagccttctcattgccgtacggggcgatcagccggtggaaatcgccggtatgcagtatttcgcggtatcgcttgaaccatgcgacctgcctgtggacctcatccaactcggcggccgacagacgccccagatcaagttcatagccgaacgtgccgaatgcggcgacgttcgcgcgcgtggcaagcggcgccgaacgcatcgtctgatggttcggcgtgatcgacacatgcgcgcccatcgtgctcagcgggtagaacatgctcgtgccatactggatcttcagccgttcgatggcgtccgaatcatccgaacaccagatctgcggcgtatagaacagcatgcccatgtcgaaccggccaccgcccgacgcgcaaccctcgatgatgagctccgggaaggccgtgagcagccgctccagcaaatcgtagacgcccagaatgtagcgatggtacgcctcgccctgatgttcggcatcgcgcgacaggtcgtagccttccgagacgaaacggttcatatcccatttgatgtatgagatgttcgcggaacccagcagcgcgctcatctgctcgaagatgttgtcgaccaccgcggcatccgcgaaattcagcagatactcattacggccatggctgggcttacggtggggagtgcgaatcgcccaatccggatgcgcacggtacaggtcggaatccgcattcaccgcctccggctcgaaccacaggccgaaacgcatgcccagatcgttgacgcggcgggccagcgaggccaatccgttcggcagacgccgcggattcggccgccaatcgcccaaccctgcggtatcgtcattgcgtgcgccgaaccaaccatcatccagcacgaacagttcgatgccggcattccgtgcggtccgtgcgatgtcgaccagcctgtcctcattgaaatcgaaatacgtcgcctcccagttgttgatgagcaccggtcgctcgcgtcgcttccaagggccgcgcacgatatgctccaacaccgtacggtggaaggcatggctcaggccggtcaggccctcggccgaaaacgcgagcaacgcctccggcgactggaacgtctcgcccggcgcaaggcgccatgagaagccgaaatcattgatgcccacttgcacgcgcgtcacgtcgaacgtgtccacttcggcatgcagatcgaaattgcccgaatactcgaaggccacgccgatcgcctcgccctgcgactccgtggtggccggacgcgcgaataccgcgcacgggttcagaaaatgcccgctcgcattgcgcaacgattcgatctgctgcacaccgtaatgcaacggttgcgtatgtggatggcgctcgcgggcccatgctccggcgaattcggtcatcgtgtagttacggtcgggcaggtcgagattgagactcatcacgcgttcgaggctgaccggctcgcctctgccattcgtgatgcgcacgctgcgcgcgatgaccggctggtcgcggaaaatcgtgtattgcaggattacggtgagacctgtcggccggtcgatgagctcgatttccaacgtggtcgcctcatcgtcatgctccacatacgttgccggcagtcccgcaagtcgtggtttgccggcgatgatgcgatagccgcctgcgtatgtcagatcggtgagggtcgatccgttgccctgccggacttccagcgccggccgccggtagtcgccgccaccgtattcggggaattcctgacgcatcctttccagcgtgtaggtgaggttgccgggaatgcggcatgtggtggtgggcgaatgcgtcacttccgtcagataactgaaatcctcacggtccggtacggctgcgccgaaatacagattgatgagcttgccctgcccgtcggcgtggaagacgtagctgatccgaccgttggtcagatggaactgccgagtatgctcgtgcacgatgatggcggcggtgttgtcggtcatgatggcctcgctggttcgtttgctgatggttgattgggattggttggaggtcaagtgtagggagcgcacgcgtgcgatgccgcgccggaaaccggcggtttgtgcgctgtcgatgacgatttgtggcgaggctcgcgcttcgtcggtgcgctcgcccgcgagtcgagcgagacggctggaaaacggactgtgcctggggcgtatcgtgtcgtaagaaatcggtagcctagtgacattacggcggaaggattttgctatggcattggcactgtacagaagatatcgccccgatacgttcgacggggtgatcgggcaggatcaggtcaccgttccgctcatgcgcgcgcttgacgaaggcaagctgacgcacgcctatcttttttccggcccgcgcggttgcggcaaaacgtcgtccgcgcgtattctggcccgatgcgtgaactgcgagaaggggccgacctcgcatccgtgcggcgaatgcgagagctgtcgcgatctggccaccggcggtcccggttccattgacgtggtcgaaatcgacgccgcctcgcacaacggcgtggatgacgcccgtgagctgcgcgaacgcgccggtttcgccccggcccgcgaccgctacaagattttcatcctcgacgaggcccacatggtcacgccgcaaggcttcaacgcactgctcaaaatcgtggaggagccaccggaacatgtcatgttcatcttcgccaccaccgaacccgacaaggtgatcggcaccatccgctcgcgcacccaccattatccgttccgtttggtgccgcaggaggtcatggggccttatctggagcgaatctgcagcgacgagcatatcgaggccgagccgggtgtgctgcggctggccatgcgtgccggcggcggctccgtgcgcgatacgctgtccgtgctcgaccagctcatggtcggttccgtggatggtgtgattccctacgattccgccgtggcattgctcggtttcacgcccgaggcgctgatcggcgaggcgatcgatgccgtgatcgacaagaacggcgaagcgttgtacggcgtggtgcagaaggtcgtggtcggaggattcgatcctcgtcgttttgtggaggatctgctcgctcgcgtacgtgatctgcttgtgctcacgttgggcggggaacgtgcggaaagcgtgctctccgacgattccgccgccgaagacatggacgatttgcgccgtcaggcttccgcgttgggcttggccgcgttgacgacgatggccgataccatcaacgccacgttgggcggtatgaccggtgcgatttcgccgcgcatgcgtttggagctgcttgccgcgcgtctgctcgccggacgtgagaccaacggctcgtccggagtggccggtgatgccacggcccccgatgcggcagcgcaaccatccggcggttccgcgcgttacggcatggccggatcgcgccgccgtccggcacaggccgagacccagccatcgcaacctgcgccaagcgtgccgcaacaatccgtgcaggcttccacggcaccgaaaagttcggcggatgccgtgacttccggcatggcatccaccatggccgccttcgaacaggccatgaacgcgccgctgggagatggggaagccaaggcaccgtcgcagacggccgcgcctttgccggcaaacgacaaccgcacgcccgatcagaagtgggacgctctggtggcaagtctgccggacgacgtacgacgctacatcaatcgtgagaaggtgccgcgcatcatgctcgacgagcaggcccaaggcggtcccaaactgtggatcaaattcgacaggtccctgagcaagtacgccttcgccaaggccgtcgcctccgaatcgctgaatggcaccaacaacgtggtgagcatcgtgcgtgccgaagtgcataaggtgttcggcccgagcgtcacgcttgcgcctgccaagaagctggccgatggggaagtggccgtgccgtggagcaaactcagccccgaggaacagcgcaagatcaacgcgcagctcgtacaggaacagctcaaggcggcaaccctgctgacgcagaatctgggttccgattccgccgccggcaaggagccgaaagacggcgaaaaagccgagtctgccgcggatccgacggacggggagagccaccgaggcgggtccgcaaccgcttcggcggaagctgatccgtggagtgctccggcgcagtccgccgcacccgccgacgatgatccgtggggtgcgcccatgcagtctcccgttgcggtgaacgtcaacgacgtgaaggcgccggaacggcatcggaagcatgtcgccgtgccggatatcagtgacgacgtggatccgtgggccgcctcggttcctaccccgcaaggcatgtccgattccatgcgggcacccgatccgatgcaggcggccgattccgtacaagccatgccgcaggatgacgatgatccgtggaatcagccgttgccgcagccggtgcagcaatcgcagtcccagccatcccagcaatctcaagcaccgtcggcgaggcagcatcgcgatctgcgtcatgaggcggtatcggctgccaatgatccgtggagccagcgtttcgccgccccggaaccggcaaagccgcaagttgccgcggaagatgacgagtactcgatgagtgacgagtcgctgggcactgcgaccgcgctggatgtggacgaattgagccgtattttcgaagtcaagaaaatcgaggatttcacggcggacgatccgaagaatccgcgtaacatgcagacgaagaagagcctcgacgactagtcacgcaaccactgaaaggtaacaatttccatggcattggcctatgacggcgccatccagcgcctcatcgacgcattcgcgcacctgcccggcatcgggccgaaaggagcgcaacgtatcgccttctacatgcttaacgcctccgatgaggagtcgcagggcctgattgacgccatcaccgaagtcaaggagaaggtgcgattctgcgaaatctgcggcaatgtgtgcgagaccagcccctgcccggtgtgtgtggaccctcgtcgcgatcgtagcgtgatttgcgtggtggaggagccgaaggacgtgatgagcatcgagcgcacgcgcgaataccgtggcctgtaccatgtgctcggcggggcgatcaatccgatggcgaacgtgcagccgagcgatctgaacatcgccaaactcatcgagcggttgaaggacagcgaagtcaaggaggtgattctcgcactcaatccgaacgtggaaggcgaggccaccaccagcttcctcgcacagctgctctcgcagaccgacatcaaggtgacgcgtctggccagcggcctgccggtgggcggcgacctcgagtatgccgacgaaatcaccttggggcgtgccctcgccggtcgccgcaatgtctgaccgtcgcatgccctccaacgaaggcgccgacgttgcggaatgaagatggcagaggcccattcgtggagtctcgcaattccgtatgctgggcgtagaggggcttgacaaatcggaatttttctataatcgtgccgcttgtctagaatcacaagcaggcaacacactgagaagattggatagttgtggctcttatcgtgcagaagtatggcggctcctccgtggccgacccagaatcgatcaagcgcgtggcccgacgcatcatcgaaacgaagaacgccggcaatgatgtggccgtcgtggtctccgccatgggcgacaccaccgatgacctgatcgatcaggcgctcagcatcgattccaacccgccggcacgcgagatggacatgctgatgaccgcaggcgagcgtatttcgatgagtttgctcgcgatggcgattcatgcggccggttcacatgcatattccttcaccggttcccaggccggtttcatgaccgatgcccaattcggcaccgcacacatcaaggccgtgaagcccgatcgtgtgcgccgcgcactcgaccttggttccgtggccatcgtggccggtttccaaggcgtgaacgagggtggtgacgccaccacgctcggccgtggcggttccgacacctccgcggtggcgctggcggtggcgctggacgccgacgtgtgcgagatctacaccgatgtcgacggcgtattcaccgccgacccgcgtatcgtcccggccgcccgccgcattccggtcattgattacgagtcgatgctggagatgtcatcctgtggatccaaggtgcttgccttgcgttgcgtggaatacgcgcagcgcttcaacatgccgttgcatgtgcgcagctccttctcacatcgccgtggcacgctgattgtgccggaaggcgtcgacccgcgcaacctgccgaatatctgaacaccagtaaagcttcgaaatcacttgaatcaaaggtaagaacaatgagcgaaaacaacaagtccctgggcgacctgttccccgatctgggaccggaagtgccgatcatctccggtgtcgcgcatgacagcaccgagtcgctggccactgtgcgtcgtgtaccgaacgagccgggcatggccgccaaggtgttcaccatgctggccgaagccggcgtgaacgtcgacatgatcgtgcaggcctccgcctccacgggcaccgccgacatctccttcaccgtgccgggcaccgccgcggccaaggtgcaggaagtgctgcaggagaagcaggacgagctgggctaccagtccttcgacgtcgacgccaatgtaggtaaggtcgccgtggtgggcgtgggcatgaaaacccattccggcctggctgccaagttcttcaacgcgctgagcgacgaaggtgtgaacgtgctgatgatctccacttccgagatccgcatcgccgcactcgtgccgctcgggcagctcaacgacgccgtcagggcattgcataccgcgtacggcttggattccgatcaggtggaagccgtggtgtacggcggtaccggccgctgaaccgagtggctgttttggcctctttggtttctttatgaggtgggttttcgcacacgattcgcgaaagcccacttttttgtaggtcgtgttttccgaaccccaatgtgaaagccccctaactattctgtggggtcactccaaagagatcgattcgtccttagggggtattgggcgtgggtgaagagcctcaaatcgtcgtaccgctcacgcacgatcccttcaaaccccttgttctgcgaatcatgcattgcgcaacggcttcaccgattatggcgttcgttgcggctgcatgccggatcgcaaggcctgtcatgccatctgaatatgcaactggggtctctttatcggatgcgtccgataaagagaccccagccagcatctctgacggtcttccgctagagatgcgcagtcatggaatcacttcttggtgatgtagcccagcgctttgagcatttcggcgctttccaacgctccgccggcggcgccgcgcaaggtgttgtgcgccagtcccacgaacttccaatcgaagatggaatcctcacgcagacggccgatggagacgcccatgccgccttcgtaatccacatccttcttgacctgcgggcgatcgtcttcggtcaggtactggatgaactgcttcggggcgtgcggcagacccagctcggcggccttgctggtatagctcaccagacggtcgacgagctcctccttggtcggattcttgccgaaattgatgaacacggtggcggtgtggccgttgagcacgggcacacggatacactgcgaagtgatgcgcagcgggccgtcgaacggtacgatctcaccctgctcgtcatccacatggccgaagaccttgagcggttccttctcggatttcgcttcctcgccggagatgaacggaatgatgttgcccagcatttccggccaatcgttgaatgtcttgcctgcgccggagatggcctgataggtgctcacgacgacttcgcgcggttcgaattccttccacgcggcgagagccggcgtataggcttggatcgaacagttcggcttgaccgcgatgaagccgtgcttggtgccgaggcgcttgcgctggtgggcgatcacgtcgtaatgctcggggttgatctccggtacgaccatcggcacgtccggcgtccaacggtgggcgctgttgttggacacgaccggggtctcggtcttcgcgtattcctcttcgatcgcgcggatctcgtccttcggcatgttcaccgcggagaacacgaaatcgacgtccttgaccacatcctcgacgtcggccacgttcttgacgaccatggtcttgacgaattccggcatcggggtttccatcttccagcgaccgccgatggcttcttcgtaggtcttgccggcactgtgcgcggacgcggcaagggtgaccacttcgaaccacggatggttctcgagcagcgtgacgaagcgctgtccgaccatgcccgtagctccgagaatgccgaccttaatcttttcggacataacaacctctcgcttgatgatggaacggttctgcaatttcgattgatgtacgcttgaggccgaccagccggccccaaacgacgtcgtgggcggccacacgcgttgtttaatcttacgaaatcgccggaacaacacccttccgccttccgtatgctggtccgtcgcccggtttgtccgattctggagaatcggacaactgcgaagcggttcaagatgtctgtgtgtccgattctggagaatcggacaagttgaggcctgcgtcacggatataaccgctcgtgcgccttgcgtacactggtaagcatgtcgaaggcatcagaagaagcgcagaagcagctggatcgtatcgtggcattgggctacccagacgtggccgatatgtcggcaggggcgttccgtgcactggcccgtccgctcatccgtgcgctggaggattccgatctgggttccgacattctgctggttcctacgcgcgagctggtttcgcccgaatcgttgatcgcccgtacgtcaatcaaccgtatggcgggcttcaccaccatgcctccgcgtgatatcgccagcttcctgccgcaggacggcttcgagccgccggagggaccgttctacctagtgcttgaaccgcataccggcacctgctatatcaaccgtgagccggatgtggcgcgcaaacttatcgattccgatgaacgcctgccccttacgttggaggaaggtcttgcgatcgccacccagcatccggaatggttgttggaaaagaacggctttaacctgctcggctcgcgcagtgccgacggccgcgtgcccagcatctggatgagccagaacgctccgcgactgggtgcggtctggccgaattcccgccacacctggctgggcaacgcctactgtgtggcccgtcgaggcgtgagcctgttccactgagatgattccgttcgccgcggggcacggaatatgccggaggcgaaatgctgtacgggctgcggcagaccgatcgcaaaatctccggctctgaacccggcccggcggccagccgtccggcgggcaaaccgtcgccctttatgaggcgtcgatgccaaaggtgccagtcaggatgagattgcaaacatcgctgccggatagcaatttagggggtatttcatatggggaagtaaaggcttgctaccgccgaaacagcttaagcgtggcatgagccagcgcggcaagtcccatcgagcccacgccgatcagggtggcaaatacctgtgggcggcgcaactcgttgcggatgccgatcagatcggtcacgcagtggtcttcgaagaacacgcggacttcgttgctggaatagcggccaaccagatcgccccatgtgagcatgcgggtcacataaccttgcggattgcgttcgttgaattcgaacaggcgaatgccgcgcagtctcgacttcgggccgtaggattcgaatccgcaggtcggtgcatatcccaagtcgaggtcatgcacgtgcccgacgaacgcgtttttatggtcatgcccgcagaacagtgcaaaatagccgccggcctcgcgcagggcctgcacttcgccgacgttgtcgtccgcgcagccgattgcttcgccgagacgtgaacctggtcggcataggtcgtgatccagcacgtagcagtgccctgcgaacttgcgcgcgccttccacggcgttaggcgtgtatgccggcacctccctcaggcaatcgtagaactcctgcggcggaatgtgctggaacgcgatcgccggcaccgcgcgaccgtcgccgttgcgcgccccgaactcgcattgcacggtgcgcagccactcgatcgcctccggggaaggcgtgccataaccgtcggaatcggccagatcccaacctcgcgagttcgaggcgtatttcgcgtatgaggcgattgattcatgaccggcattgttggcgtcgttggcgggctgttccgcgtaatccccggaattgaccatcatcacgctcattgcgatgcgccccgatccatcggaggcctcgatcggcagcgcgaatgtgcctggctccaacgccagcggggaagatccggcaacggggttcatgcatccggaaaattcacggtagatgtcatcttggtcatcggcgagcacaccgcactggaaatcgtggttgccgtaggtcgccgcgaacggaatccgtgcttccagcgcaggccccagaaaagcggcgaaggtgtcgcgcactttctgccgggcctcttcgatcagtgcgtccatggtggcgctgttgatggattgcgcccatgattccagctttgatttcgtgccgttgccattgcgtctcacgagtttcggcgagtcggtgcctatgccgtcgatggtccagttgtcgtcggtcggctgcgtgttgagcaacgcttttgacagcgggtgacgtttgatgccgcgtagcttcgcttcgaattcggtcaccgcacgcacatgcgttcccggtttttcgtcacgtcggcggagaaacgtgtcgatgtaggccgggtcatatccgcggatctggtcgccggtgaacacgatgaggtcgggatgcgcttcgtggatggcggcttcgatgagccgaatcgtgtctttgcgcacgttcgggccatcctggatatcggccagttgcagcacgcggaagctgccgtcgctgttgaaacgcagtgtcatgatgctcactgtaatgcggcaaatctggatatggggtgaaagtggattcaaaaacgctgtcatatcccgaaatgacgatgatttatggggcccgttgccgctaggattagccgcagtgcgaaaaagttacacgcacgtaacaattaagccggcagggagccggcgacatcaaagataaggaggagtgatgggtcagggtcaatcttcagtgtttgatctcgcggcgatcgccgcagcgtccaacggagggaacaacgacccgctgctgcctccggcgcgtttcattggagctccgcaaaagcccagcaagatgccgtacaacaagtacgttgcatacgataagcaggtgccgtttgatttcccggagcgtacgtggccgggcaagcgactgcagcgtgcaccgcgttggtgctccgtcgatcttcgtgacggcaatcaggccctcgtcaacccgatggattccgagcgtaagctgcgtttctggaatctgctcgtgtcgatggggttcaaagagattgaggtcggattcccgtcggcttccgaaaccgattatgacttcatccgcatgctcatcgagcgtgagctcattccggacgatgtgaccatcgtcgtgctcacccaggctcgcgaacacctgattcgcaagacttatgaatgccttaagggcgccaggcgcgccgtcgtgcacttctacaattccgtatccgtgttgcagcgtgaggtcgtgttccgcaaggacaaggccggcatcaagaagctcgccaccgatgcggccaccctgtgcaaggagctcgaaggcgaggccgagggcatcgacctgtactatgagtactcgccggaatccttcaccggcaccgagccggaatatgccgtcgaggtgtgcaatgcggtgatcgacgtgatcaagccgacgccggaacatccgatgatcatcaatctgccggcaacggtggaaatgaccaccccgaacgtattcgccgacgaagtggagtacgtgtccaacaacctcgtgccgcgcgatgccgtggtgctctccctgcacccgcataacgacgggggcatgggcgtggccgccaccgaactggccgtgctggccggcgctgaccgtgtggagggttgcctgctcggcaacggtgagcgcaccggcaacgtcgatctggtcactttgggtctgaacttcctgacccagggcatcgatccgcagatcgactactccaacgtgccggaaatccgcaagacggtcgaatactgcaaccagctgaagatttccgagcgtcatccgtacgccggtaatttcgtgttcaccgcattctccggttcgcatcaggacgccatcaagaagggtctcgaagcccgtcagatggcggccgaccgtgctggcgccgatctggacagcttcgtgtggctcgtgccgtacctgccgattgatccgaaggatatcggccgtacctatgaggccatcattcgtgtgaattcccagtccggcaagggcggcatggcctacttgctcaaggccaaccataaccttgatctgccgaagcgcctgcaggttgagttcgacaaggtcgtgcaggcctatgccgatgagaccaagaaggaagtcaaggacgaggacatctggcgtctgttcaaggacgagtacctgccggtcgaagagtccggtgccaccgccgcgggcgttgtggtcggcgacagcaaggatgagtccctcgagcagtggggccgtctgaagctgctcaaggtgtccgtctcctccggtgaggatggctccgataccgtgctcaaggccaggattctcgaccgtggcgtgaacgtcggcatcgacgagcccattgagcgcgaggtgtccggcatgggcaacggtccgatcgccgcgttcctcaatgccgtgagcaacttcggcatcgccgcctccatcatggactacgtcgagcacaccatgtccgtcggcaccgacgccatggccgcctcctacgtggagtgccagatcggtgaggaagaggacacgcagatcgtgtggggcgtcggcatcgacacttccatcgtgaccagctcgctgaaggccatcatctcggccatcaaccgttccgagcgctgagttccgacagtataggccaggccgggcttaagactcgcaatgcaggtgggggcttccggaaacactccggaagcccccactgttcgttgatcggctttgattgtggccggtttgatgcggggaatcagacctgtgaaccccatacgcatgtattgccgccgattgcggtgaacgtcatgaccgatttgaggtcggtttcgcgcggtagctgggcgaagtcgccttggtattcggtgccgtcgatggtgatggtcatctggttggagtccttgttgaagctccaggtgccggttttgtcgccgctcaccttgccgccgctttccagcttgatggtgatgggttcgtcgacgcccttgtacgggtacttgccgtctttcgcggtgccgttggagccttggaagaacgtggtcggatcgtgcaccacgaattcgtattcaccggtgagctggctttcctggtagcctttggcgttggccttcaccccggtgtattcgtatggtgcggccacgagccagccgtcagcggtggtcagcagttcgcgtacgcgtacctcatgctcctcgttgcggttggagaagcgagtgtggtatacgacataggcggtgccgtcctcgtccacgaacgcagagttgtgcccctgcgccacttcgatgttggcgttgtcgttgccgctccattccactgagcccatgagcctgattccggtcttgagggtccagttgctgccgatggtttcggtggagaccgcattgttgccgtcttcgtccacatatgggccggtgatgttcttcgagcggaattcgcggatctgatagccgccctgttgttgcagcgcgccgtaggagacgaacaggtaccagtagtcgccctgcttcatgatgtaggagccttcgccggagttgccatggcctcctgcgattttgatgccgtaatactgatcggtttcgtctttggcggtttcgtaagtggtggtgtagtcgcgaaggccggtcgatgcgtcgagtttcagtgcccacagtccgccgaaccaagagccgaacgtcatccagagactgccgtcgtcgtcatatttgacgcttggatcgatggcgttgatttccgtatctccgggggagaggtatcgtgtcggcacttcgctactgccgagtactttcggcacgtcggttttggctacggtgtcgtctcggaaaccggaatagacgactggtccgacgagcgtccagtctccttcgatcgtgtcggcggtgagcagcacgattgcggatttgtagttgatgccgttgactgacatgtacatgcaccatttcttcatggccttgttgtagatgacgtccggcgcccacatgttgccggtcaggtcggaattggccggttgcttgggccattcctcccagaaatctccgaggatcttcttgtagtcggtgctcagattgttggtgaacgattcccagttcaccagatcgtcgcttttcagccaggcgcgatgtgagccgaagatatagtatttgccgtccgcttcgacgatggatgggtcgtgtgacgagcctcgtttgatgtcggatgttgtgttcacgattggcttctctccggagctggttcccgagcagcccgccgcggtgcccaacagcatcgctgcggcaatgatcgcagctatggttttgcggatcatctgggatgttcccttcttgatagcggtgacgatgtcaatttgtacaacgttgtaatatgcgctatagtacatcgttgtaaatgaattgtccactgaaggggtgtcccatgtcggccaactatgctctgctgtgttacacgcgtgcagccaccagtcgtgaagaggcgaacaacgaggacatcgcctatagcgtgcaccttgcgctgcgttcccagatcactggcaaatgggaacctctgaacgaaaactatggcatcttcttccccgccggcgtaccgattgcggcagccactgagagctcgcgccgcgcgtgcagagccgccgtacgcttcggcaccgaaccattcgatggcccgcgtcccgccagcgacgccgtaagatatgacgcggtgatgcccggtgtcgacatcaccctcaaatccctgcgtgacccgtacctgttccgtctgcaggatgggcgcttcgccatcgcagccacgcgtaccaatcgcgaaggaacgcccgacggatcggaaaagtcggcgtttctgttggccgtcagcggcgacctgacatccttcatccagccggggctggtgctgttgcgcacggagaacggcgtcaatcacccatccgtcacgttcgacgagaccgccgcacgctatgtgatcacctttacgggcgatgatggccgttcgtattccgcgcagacggaggatatcgtcgcgtccgcgcattccggtgagcctttagacgttacggaaaatacgcaggcgtcggaacgccaccattccttcgattgcgacattccggacgccgtgcccggcaacgtcatctcggttaccgaggacgaagccaagcacctgattgcgcggtttggccgtgtatacaatgttgcggccactgtgccaccgcaacatatcaacgccctgagcggcggcgaagatgcccgtggcgccgtcatggcattgacccgtactcgtgccgaactcgtctacagcgacggttccaccgctacccgcgcagtgaactggaaccgggaacagcttgagaccattgcgagggaagcttcggaaggcaagctacgcgccggcgaatcccgtactgtggaaggcaagatccgtcagaccgtctacccggtgcctttcgccgtggaacgtgccgacccgtcagtattcgcgtggaatttcaatggcaagccaatgttcatgttcatcgctaccgacgacaccgacggcaattgcatagacccgaataatggcgccacccacatgccgctacgcgtcgccgactccatcgaggaactgtccgacgtggcgggcggacgcgccaaggagatcgatctgctcacatgcggcgacctgaattccgaaggtcgcgagatgaccggttgcttctgggcgccggaattgcatgtcatcggcggcaagctgtccattctgttcatgccgtgtttcgacggaccttccgtcaatccggacggtacgccgaacgaccgtgcaggtaagccggacatgtggacgggaagttgccacatcatgcagctcaaacagcattccgatggcacggatttcgacccacgcgagccggagaactggactgttccgcagccgattctcgatccggatggcgcaacgctcaacccaatccagcgcatttcgcttgacatgaccgtcatcgtcgattccgggcgttggtattacgcgtggcagcaggtcggcagcatctggatcgcaagcttcgacccgtcgaatccgaccaggctcaccagccgtccgacgcagatcatcgtgccggaattcgcgtgggacaacatgatcgccgaagggccgaacgccttcgtgcatgacggcaagatctacctgatctactcgggatcgcttgtcggcatcgactatacgaccggtctggcgactgctccggcggggcagcgcattgacctgaccgaccccgccaattggacgaagctcgactatccgctgcagaagtccggtccgtataacggccagtggcagctcggcaccggtcacggcatgtggtcgcatgatgaggatggcaatctcatctatgtgttccataacgcggaatatgagcacggtcggtacggtggccgtgacgcccaggtgcgtcgggtgcactggtccgcggagggaatgccgatcttggatatggattctgcggaagagcttaatccggattatgcttatgtaacgatgcaaatcaacgtttccgacgctgactgattccatccgccacaaggggtacatcgtttggcgggcggagtgacgaagcctgtcggggcggtggccggttggctagaacatttgaaaaaggggaacgtatgtcgaggcagactgggtccaacggcgagcatgtcgtaaccatgcgtgaagtggccaaggcggccggcgtgtccatcaagaccgtgtcgaatgtggtcaacgactatgagttcgtctctcaggccactcgcgacaaggtgaacagggccatcgatgagcttggctataccgtcaatgtgtccgcacgtaatttgcgtacggggcagacgggcatcatcggtctggccattccggatctgcagatgccgtatttcgcacagctttcgtcattggtcatagaggaagccaagaaacttggcttgcgtgtgatcgtggagcctacgctgtattcacgcgaaggtgagatcgatgcgttgcacggctcccagcagaccatgattgacggtctgatctacagcccgctcgaactcgatcaggatgacgtcgaccaattgaaggtggattatccgctggtgctgatcggagaacgcatcttcacggatttggtcgatcatatcgccactgagaacgtggagggtgccaagcgtgccacttcctacctgttgcagaccgggtgcaggcgtgtggccgtggtcggcgttcatccgggggagaaggtcggctccgccgcactgcgttaccgaggttatcgcgaggcgttggaagaggccggcgtggaattcgatgagcggctcgtggtctcgtccggtatgtggcaccgtagtgacggcgtgaaggccatgaactcactgttcgattccggtgtgattcccgacggcgttgttgcgttgaacgatatgcttgcctccggcgtgatgcatgccattcagatgcacgattatcggattcctgaggatatttccgtgatcggtttcgataattccgacgattcccagtatctttcgccggcgttgacgtcgattgacccgggacttgaggcggttgcgagactttccgtcaaggtgttgaaggaacgcatcgacggacgtgaaccgaacggcgaacacccggggcgcaaggtgttccgcaaggtgtcctcgtccctggtgatgcgccagtccaccaagcttccgcaggaatcgttggtggtctgagcctttttcggtaagggccggcctgtgcatgatcgaatgtcatgtgcaggccggctttgttgtttgggaggaataggtaccgcaacactccacgacaccgacgcgattttgtacaacgatgtaatagtggtatattcaacgttgtaaattactggaacagcggattgaaaaggaataaacatggctgtttacaacaatccgatcgtgcttcagcgcgcagatccctgggtgcttaaggttgacggcgagtattacttcaccggctccgatccggaatacaactgcatcgccattcgtcatgcgtcgaccatcaacgacctgcagaaggcgccggagaccgtggtatggcgcaagcatgaatccggtccggccagcatctacatctgggcgccggaactgcatcgcatcaatggtgcatggtatatctatttcgctggtgcggcaacggatttcgagacctcgggactgccgacgcatcgtatgttcgtgctggagaacaccgatgacgaccccacttccgacaactgggtcgagaaggggcagatcgccactccggtcgactccttctcccttgatgccaccaccgaagtgatcgatggcgtgcagtatctggtatgggctcagaaggatccggcgatcgagggcaattccaacctgtatatcgccaagatgaccaatccttggacgttggaaagcgaaccggtgatgctcaccaagccggaatacgactgggagtgcatcgacttcctcgtcaacgaaggtccggccttcctgttccatgagaacaagatctacatcacctattccgcttccggcacgggcgttccgtacgccgtgggcctgctgaccgccgagcgtggctccgatttgctggacaaggcctcctggaccaagagcccggtgccggtgttcaagacctgcgccgagcacggccagtacggtccggggcataactccttcaccaagtcggaggatggtgccgatgatctgatggtctaccactgccgcaactacacggagatcgccggggatccgctgttcgacccgaaccgtcacgcccgcgtcggcgtggtgaaatggaccgaggatggccctgacttcggcgttccggagcccgacaatctgtggaccccgaccacgaccgacgtgctgcccgccgatggcggagcgctcgcgggaactcctgcggtgcgccgatcatagggcacccataactggatgggggcatggggaaatggcttgtcgtccggtgtgtcatcaatttgtacaacgatagaaaaagctgtataatcaaaattacaacgttgcaaatggcatcgcagctgaacatggcgcgcggacgggaacggtgaacaacgaagtcgggtccgccgccacatgcaatgtttgaggataaggaatcttgggagaccaagagataaggagaaatccatgaagatcaagaagagcaccaaggctctcgcggcggcggcctccctggccatgctgtccaccgttggcctgtccgcctgcggtggctccgattccggcgagaccgactccaacggcaagccgatcatccgcgtcgcgctgatcaagcgcagcacccagatcgaagccaaggaaatgaagcttcagaaggatctcgaggccgcctgcgactgcaccatcaagtgggatgagattctcgacacccagtggtcccagcaggcctccaccgtgctggcgtccggcgacgtcgccgacatcaccgtgtggggctacaactcttccaacttcgcccagtacgactactgggaggacctgagcgacgatctcgaccagatgccgaacgttcaggcgtacttcaaggaggtcccgaacgccaagaagttcggctccgacatcgatggacacgtgtggcaggtcccgtccgactacggcaacgcctccggcgccaagtggtcttccggccagaacctcatgatcaacaagtcctggctcgagaagctcggcctcgaggttccgaagacctgggatgacctgaccaaggtcctcaccgccttcaagaacgacgatccgaacggcaacggcgaagccgacgaaatcccgatgctgatcaaccagctcggcaccgccggattcaactggtgggatccgttcctgctgctcaacggtaccggcctgaacacccagatgatcgccaacggcaatcagggcatctacatcaaggacggcaagatcggcaacttcatgatcaccgacaacttccgtcaggtcatcgaatactaccactccctgatcgagcagggcctcatgccgaaggacatcctgacccgtgacagctcccagaacagcgccgacatctccaacgacggcaagaccgcaaaggtcggcctgatcttcggctggaacaccggcaacttcggcgacctgaaggaccagtacgagtccatcgaggtgccggccgccccgggcgtctcctatgaggagaccacctgggaaccgcagttcgaagatatctacaacggtgcctgcgtcaaggccggcctggatgacgagcacaaggcggccgctctgaagatcatcaacaagtggattgagccggatacctccatggagtcctattacggcgatctcgacaagtacatctccaacgagggcgacggcaagtacaaggtcatcgaattccagaaggatctgtccacctacggtctggcagaccgtggcctgacctacgtgtccgatgacatgtccgtcgaaggcgacgaggacaaggttctcgccgagaaggacggcaagacctacgagacccagcagtcccatatcggcgacaaggacctcatcccggcctacgtccgcctgtccgctgaagacaacaccactgtgtccaacaacaactccaacatcttcaactacgccatgccgttgatctccacctggattcaggatggcggcctgaccgacgcgaagtggaacgagtacgttgacaccatgaagcagcagggcgtcgatgagaacgtcaagctctggcagaagtggtacgacaagaccatggccgaagagtaagccaggttccctaccgacattcccacataaccgaaccagccctccctcgcggtgagcatcaatccgcaaaccggcgggggagggccatacattgttcacgtttcgtatcttcaaacttcatttccggcgattgtccggacaacccaagagagggatggatatggctgtttcgcaaatcgcagcatccgcgtcgaacgcagacgtcccggacaacgactacatcgccaagcacaagcccctgccgatccgcatcggtactcatcttcgtcgctactggcagctgtggctcatggccctgccggcaatggtattcgtgttcatcttcgcctacattccaatgtatggcatccagctggccttccgcgagttcgttccgcgcaaaggcctgaccggcggcaccttcgtcggcctgaaatatttcaacaagttcttccagtccccgcagttcgccaacctgatgtgcaacaccatcagcatcagcctgtggaccctcgtgatgggtttcatctgcccgatcatcctggccctgctcatcaaccagctcggttccaagaagatcaagggcttcgtgcagaccatcacctacatgccgcacttcatctccaccgtggtcatcgtctcgatgatcagcatcttcctgaacccgacttccggcttcatcggccgcttcctcaacgaggacggcaagagcatcctaggtgatccgaatctgttcactccgatttactggatcaccgaagtctggcagcattgcggctggaattccatcatttacctggccgcactggccggcgtcgacaccgctctgtatgaggccgccaagatggatggcgcgagtcgtctgcagctcatccgctacgtcgacatcccggccatcctgcctacctgcggcgtgctgctcatcctcaacatgggctccgtactgaacgtcggcttcgaaaaggtcttcctgatgcagaactcgctgaatctgagctcctccgaagtcatctcgaccttcgtgtacaagatgggcttcgtcagtaaccagtacagctattcgacggcaatcggcctgttcaacacgttgatcaacttcgtgttcctcgtcatggccaacgcgatttccaagcgcgtgtccgataccagcatcttctaacggtcggtacaaggaaaggacattcaaatgagcaattccgttgcacccgccatcaagacggcgaataatgagattccgtggaatccgaaggtacgccagaagaagcagccgtccgattacgtggtcgacttcctgatcggcctgttggtggtggcggtcgtcgtggtggtcctgtacccgctgtggttcatcgtaatcgccagcttctccaactccgctctggtgtcccagggcgcggtgaccctctaccccaaggacatcaacttctccggctacaccaagattctcgaggactcccgaatctggaccggctacaaaaacaccatcatctactccgtgatcggaaccgcggtcaacatgctggtcaccctgccggtggcgttctccctgtcccgccgcgagttcaaggcccgccgcatcatcctgttcctgttcaccttcaccatgttcttcgccggtggtctgattccgagctacctgctcttcaaggacttgggcatcctcaactccatgtgggtgttcatcctgccgggtgccgtgaacgtattcaacgtgatcattgcacgttcgttcttcgagacctccattccggaggaactgcatgacgcggcccaggtggacggtcttggttacttccgctacttcatgaagatcgtgctgccgctgagctcggccatcatcgccgtaatcgcactgtactacttcgtgggtcactggaacgacttcttcaccggccttatctacatccgcaaccaagagaagcaaccgttgcagaacgtgctgcagaacattctgctcgccaaccagatgaccacttccggtggcggttcggatggccgttccatgctggaacgccagcaggccgcggatcagatcaagtacggcatcatcatcgtgtccaccctgcctctgctagtcgtctacccgttcctgcagaagtatttcaacaagggcgtcatgatcggagccgtcaagggctgatacgcgacacgagcagtccgaaatcgccgatatggcacttcatctcattctcctccttccgaaaaggctgtcgctcgtagtggcggcggccttttcgtatgagggcaagacatcgtatgaaaccaatcaagtagtaaggtgacacctatgaccgaagcgaccgacgcatacggctatctgctcgtccacttcatcgaggatccggacggctacgccgagaagatttacatggatgtatccgatggcgacaatccacgtcgatggttgcctatcaacgatggaaagccggtgttgacctccgccatcggtaccacgggggtgcgtgacccgcatatcatccgcaatcccgaaaccggcacatggtacgtcatcgccaccgatttgcgcgtgttcggaggagacgatgccggctggttcgaatggacgcgccatgccagtacgaatctgatcatctgggaatccgatgacctgttgcattggagcggaccgcgtatgctcgacgtatcccgtaagccggacggttcccacctcgagcttggcatggcatgggcgtgcgaatgcctgtgggtgccggactactatccggcggaacatgaaagtggtcgcggcgcattcgtgatgtactggtccagcaccatcttcaacaatgaagacacgcggcatgacgacaaggacgtctactgcaccgtactgtggggagctaccaccgacttcacgcaagacaccttcgaatacggtggcgtgttcatcgacaacgacggggatgccatcgacaccaccatgatccaacgaccgctgcctgacggcggaatgcgcacgtaccgcatcaccaaggacaatgcgcacggcaacggcatctggatggattccaccgatgcgaaacgctggtgggagcccgatactcagtggaccttggtgcaggaccgaatcggcgccgaatacgtgccggacggcaatcccggcggagtggaagggccggccgtgttcgccaaccaccataacgacggcggtgccgacgacgaatggtatctgttcgtggacgtgattccgtcaatcggctaccagccaatgatcagccatgatcttgataaaggctgggtcaagctggaaagtcaagactatttcctgaccgagcatacaaagcatggcggtgtggcttcgctgacacgtgccgaatacgaacgtctgcgcccattggccgcactggccgacctgcggggctgaacacaatttttacggatatggtgagggccgcccacgtcttcttgtgggcggccctcaccatatccggctgcatgacggtcacctccaatgacggcgattacgcgtcattggcactggtaccgctattgttgcggcgattgtgtcgactgaccttggtcgctctgcccctggctgctctggtcagtggatgaaccgctgccaccgttgtcgccgctgccggagtccgcatcaccatcaccgctgccgctgcccgatccgctgtccggcgtggtggtttcggtcggggacggcgtggtcggctgcgtgctttcctcagccttcggcgtggcctgcgaggtgtatgacttctgcgcgcctgtaccccacgtgccatccgatccgccgaccttgccgctgtcggtcgcggtcgggaatgtctcgttcggggtatcggccaaggcctgcgtcatatattcggtgaacaggtgcaccgggtagtcgctgccgccggtccagctaccgaaggccgggatttcctgcggattgccgttcgcatccgggtaccacatagccaccgtcgttaccaccgaaggggtgtaaccgatgaaactggccgccctggaatcattcgccgtgccggacttgcccgcgatggtatgaccggtggcgcgcgcctcggtggcggtgccacgctgcaccacgccggtgagcgccttggttaccagattcgcggaattggcttcgaacacctgctcggccgtggtcggcgcgttatacaggtcggatccgtccggcgtcttcacggaggccacgatatgcagcgtcggcttgttgccctgattggccaacgtggcgtatgcgcgcgtcatgtcctcaacgctcaggccgttgttgccaagtacggtgtatggttcggatccatccaaagacgtgttctccacacccgcctcgcgtgcggtatcggcgattttcttggtgcccagcttggtctgcaaatccatgtacacggtgttcgacgactgttcggtggccgtatacaggttcacgtatcccaggttcgcgttgccgtagttgctcacggtttcggtgatgccggggaaggtgcggaacgagttgccgttgaacatcgtgttcaggcttacgccttcgtttatggcggccaataacgcgaacggcttcatggtggaaccgacctcgtaggtggcctgcgtgacgttgttgagctgcttggtcaggtaatcgtcgcccgcgtacagcgcgataatcgacccgtccttcgggttgaccgacagcgcgccgaactgcatgccgtccggcactacgccctgcatgccgttctgcgagggactgaccaccgaatacatcagatcctgcttggatttgtcgatggtggtcacgatcttatagccgcccgtttcgaggtcctgcttgctgaaggccttcgtgccgatgagttcgttctgcaccatggtcagcaggtatccgttcgcgccttccaactgattgctctgctggtattcgatggcttgcgggaattgcgattccttccgttgcttggcggtgatgtagccgtcttcctccatgatgctgagcacgcgcttgtagcgcttctgggcctgtgcctcgtccaccgccgggtcccatgcgctcggcgccgggatgatgccggccagcgtggccgcttcggacagcgtcagatccttggcgtccttgttgaagtacgccttggccgccgcctggatgccgtatgcgccacggcccaggtagatggtgttcatgtagttgcacagcacctggcttttatcttgctgttgcgcgatcttgatggccaggaacgcttctcggagcttgccggaatacgatgtggtctcgcccagatagtagcgctccgcgtactgctgggtgatggttgagccgccctgccggctaccggtggtcaggttgttgtacagtgcgcgtgcgatgcccaccagatcgatgcccttgttggtgtagaaggaacgatcctcggaagatacgatggcgttgccgacgtagtccggcagcacggagcagtcgatgatctcacgattctgctcggcgtagctgccgatttcggtggtgccgtcggaatagtagacggttgttttttccgcgagcgcgaacgcctccggctccggaacgctcgtggtgacgtacatgtaggcgaacaggccgatgcctgccgtgaggagcgccgcgaaaatcccgagcacccatttgagtacgagatgcttgcgcttggtacgattcttctttggtccattggcgcggtgcgagccgtggctgttgcgctgcacgttgtgcgtgttgctgcgagcgctacgggtgccgtctgcctgcggggcatgggagcgcgagcttacgcttcgagtctgtgaaaccatgccttctaccgtagccgccagtcctgaaaaacgggcgaaaaggggtggtggattgcataagttaggtgatttatcctcggttcttttacaaatcgacagaatttcgccgggtgtcgcaatagcgccgattgttcagggttttctcagtcgtacaggtggattcttgccgattcgcaggtatgcttaaaagttgtatacctgcaacgcatacatatgaggagtcgtttcagatgagcattcgcgtggctatcgccggtgtgggcaattgcgcttcgtcgctggttcagggcgttgagtattacaaggacaccaaggacgaggataagattccgggattgatgcacaacaatttcggcggataccgtgtgcgcgatatcgagttcgtcaccgcattcgacgttgacgcgctgaaggtcggcaaggacctgtccgaggccattgaggcttcgcagaacaacaccatcaagttcgccgacgtgccgaatcttggcgtcgaggtgcttcgtggcccgaccgaggatggtttgggcgagtattaccgccagatgattgaggagtcgacggccgaaccggtcgatgtggctcaggtgttgcgtgacaagaaggtcgacgtgctggtttcctatctgccggtcggctcagagcgggctgacaaggcctatgcccaggccgccatggatgccggctgcgcgttcgtgaactgcctgccggtgttcatcgcctccgatccggagtgggcgcagaagttccgtgatgccggtgtgccgattgtcggcgacgatatcaagtctcaggtcggcgccaccatcacccaccgtgtgctggctcgcctgttcgaggatcgcggcgtgcgtctcgatcgcacctaccagctcaatgtcggcggcaacatggacttcatgaacatgctgcagcgttcccgtctggagtccaagaagatttccaagacccgtgcggtcacttccgtggtgcctcacgacatggacccgcataatgtgcatatcggtccgtccgactacgtggcttggcttgacgaccgcaagttcgccttcgtgcgtctcgagggcaccacgttcggtgatgttccgctgagccttgaatacaagttgcaggtgtgggattccccgaactccgccggtatcgtcatcgatgccgtgcgtgccgccaagatcgctcttgaccgtcatctggcgggcccgatcctggctccgagctcctatttcatgaaatccccggccgtacagcatgaggatggcgaggctcgtcgtctcgtcgaagagttcatcaagggcaacgtcgaaggcactgaggagcagctcgatgccgatgtcgccgccgccaaggccgcgggcaaggatgtctggaaggcctgagccgctgcgtgacgcgcatgcgtgatgcgtatgagtacgtatgggtaatacgtgtgagtggcgcatgtgagtgatgcgtaaggggcgggcccgcggattgtacactccgcgggcccgccccttcatctatcgacgctcagccgccgtcatcgtcgatagtttggccagctactcaatctaccgacactgacggcgactgagcgtcgatagattgggaaaatacccaatctgccgacggtgaggcgttgtaagcatcggtagattggttcgttcctcagactaccgacactgagacgttgtaggtgtcggtggattggggaaatacccaaactgccgacggtgagcgggggctcagcgtcggcagtctgaggaaggacggactacttcttgaggaggggttcgacctgctgttcgtaggcggtcagggccgtgtcgatcacattgtgcatgtcgtaatacttgtacgtacccagacggccgccgaacacggtcctcggctcggccttcgcgagctcctcatagcgcgcgtacagcgccttgtcggattccgtgttgatcggatagtacggctcgtcgccacgctcggcgaaacgggagtactcctcccacaccacggtcctgtccggattctgccggtcggcacgctccggattgaagttcttgaactcgatcgcacgcgtgtacggcacgtccgcatccgagaagttcatcaccgggcagccgaaatggtcgccctcgtcgtagcggacctccttgaagtccaccgtgcgccacttgagctcgccgagcgaatagtcgaaatagcggtcgaccggacccgtgtacaccaccggcacgccggcggcggccagggcggccttgttgtacggctgggattcgtcgaagaagtccgtctccaaggtcacatggatgcgcggatcgtcgatcatacgctccatccacgcggtgtacccgtcgaccggcagaccctcccacgtgtccatgaaataccggttgtcatagttgaaacgcaccggcagacggttgatgatgcccgcgggcaggtccttcggatcggtctgccactgcttgcccgtgtagttcttgatgaacgcctcatacagcgggcggccgatcagcgagatgcccttgtcgttgaggttctgcgggtcggtaccggccaattcgccggcctgttcggcgatcagggccttggcctcggccggcgtgtagtgcgcgcggaagaactggttgacggtccccagattgatcggcagcgggtacacctcgccgtcgtgggtcgcgtacacgcggtgcacgtagtcggtgaaggaggtgaacctgttcacataatcccacacgcgcctgttggacgtgtggaacaggtgggcgccgtacttgtggatctccgcgccggtctcctcgtccatgtagctgtacgcgttgccgccgatatggtcgcgcacgtcgatgatctccaccctcacgccgagatgctcgacggcctgctgggccacggtcaggccgaacaggcccgcgcccacgaccaccagatccggatactgcaccttctcagtcataagaacaaccctccaaatggtttgcaaacacacatcacacgtgtgcgattccatgcccatagtacccatgcctatgctctacgcgtattccagcgcactacgtcaacggaaaattcgcatgtatggcctctggtccgggcatggtgtacactggtctttgcctccgcgtggcggtatgtcacccaactcccccagggcaggaatgcagcaagggtaagtggcctcttccgggtacgtggaggtttttcgtatatgcggcccgatatgtccggctacgtacgttccgcttcgaaatgacatgggtggcgtattctcgatgagtatgaccgacgaattcaagcccatcatccgagatccgcagaagtccgcgaatatgctgcagcagaacgcctcttccgaagcgttgggatccacgggatcgaacacttccactgacccggtcgccgacgtgctgtcggcggacgaagtgcgtagggggctcgccaaagccgacccgttgacccgccatccccgtatctccagcatcgtgcagtgcgtggcattcggactgatattgctggccgcttccgtcggtgtgtggtggctgggcgtatacacgttgagcggccagagctatgaggacatggtctggtcgaaattcccccatgtgctgccggcatggcttggtccggtggcacatatcttcgcgatttcactgctggtgcaaggggtcagcgtcgccatggcgatcatcgcattgattgtgctgatcgtgcgtaagcgatggctgttgattatgcagttggccgttttcggcggactgtgctttacggcggcgaaggtgcttaaaagcgtgcttccgcgaccctatctgattaatcttgattcgaatcccgccaattccgcaccttccggccataccatccttgccgccgcagccggtgtgatgctggtatgtgcggtgccgcgcgtcctgcgggcgctggcggcggcaatcggctggctctacgccgtgctcgtcggactgtcggtgatcgccgcccaatggcatcggccgatcgatgtgatcatggcattgctgatcgtcggcggtcttgcgctgctgatgctcgccgtgagtttcgccaatggcatggatgagcccggcaaacgcacatcctcgccgtcggtacagatcgtcggcagcgtgatgctgacgttcggaacgctgggaaccctgtacggcgcctacatcatctggcagatccagcctggacttgatctcagtgcggaatggacgaatgccggtgcatgcgcctccactgcgattctcacggcatcggtctgcgcattggtgttcgggctggtgctggtcatgcgccaactgaccgcatcgccgctgacgaagctcggtctggtcggcgctccgccggccccaccgaagcagtaagggcgaggtgcctgccgctcctacggcacacgggagtttgccaatcctctatagttcgtgcgtattattgcgttgcaaacgctagtaataaggagtggcaatggctaccggcagcaagctcgttattgtggagtctcccaccaaggccaggaaaatcggaggatatctcggctccgactatacggtcatggcatcggtgggccacattcgcgaccttgcgcagcccagccaggtgccgtccgccgacaaggccaagttcggcaagttcggcgtcgatgtggaagacggcttcaagccgtactacatcgtggacggtgataagaagaaaaccgtctccgaactgaaaagcgcactgaaaaaggccgataccctctatctcgcaaccgatgaggatcgcgagggggaggccatcgcatggcatctggtgcagacgctcaagccgaaggtgccgatcaagcgcatggtgttccacgagatcacgccggaggcgatcaaggcatcgctgaataacacccgcgatgtggacggcgccatggtcgacgcgcaggagactcgccgtatcctggaccgcctgtacggctacgagctgtctccggtgctgtggcgcaaggtggggccgggcctttccgcaggccgcgtgcagtccgtcgccacccgtctgatcgtcgagcgtgagcgtgagcgcatggcgttcgtgcgtgccccgtattgggacgtgaccgccacgttggaggcgatgggcgccgaaggtgacaatgtggccttcgattcgcgcatggtgtcgcttgacggccgtcgtttggccggttccaaggatttcggtgaggacggtctgctgaccgccgccggtgccaaggataatgtcgttcagcttgacgagacgcaggcccgtgcgcttgcgcagtcgctggaattcgcgacgttcaccgtcacgtcgatggaatcgaagccgtaccgtcgccgtccgcttccgcctttcaccacgtcgacgttgcagcagaccgcaggcaatcgcctgtcgatgagctcgcgtcagaccatgcgtgcggcgcagggattgtatgagaacggctatatcacgtatatgcgtaccgattcggtgacgctgtcgcaggaggccatcgcggccgcccgttcggcggtgaagtcgcatttcggcgacacgttcctgtcagatgcgccgaagcagtatgccaccaagaccgccggtgcgcaggaggcccacgaatgtattcgtccggccggcgcacagttccgtgatccgggcgaagtcgccaagaaggtgcctgccgatcaggcccgtctgtatgcgttgatttggcaacgtacgcttgcctcgcagatggccgatgccaccggttccaccgccaccgtgcgtttgtccgcatcggctggagaccaaggtgaggccgtgttccaggcttccggtacggtcatcgagttcccgggctttatgaaggccacaggggagggacgtcacgcctcctccgacaaggccaccgacaaaaccgccgagcagtccgtcaaagcgaacgatgataacgcttccctgccgccgatgaagccgggcgacgagcttgccgcgacggaagtcgccgccgacgggcatgaaacccagcctccggcgcgatacaccgaagcctcgctcgtcaagacgcttgaagccaaggagattggtcgcccgtccacatatgcgagcatcatctccaccatcatcgatcgcgggtacgtgtatgagcgcggtcgtgcgctgattccgtcctggctggctttctccgtggtcaagttgctggagacgaagtttccgaagtatgtggactaccagttcaccgccgatatggagaatggtctggaccagattgcccacggcatggaaaccggcaaggattggctgaccagcttctacttcggttccggagaaggcgcggcgcagtctcaggatgaggcgcatgccggtctgcagcagcaggtcgcgcagcttggcgaaatcgatgctcgcgccatcaatacgattgagatcggcgacggtctgcatgtgcgtgtcggtcgttacggcccgtatttggaagatgtgaacgatttggatggcgagggcaatccgaagcgcgcgtcgttgccggatacccttgctccggatgagctgacggtggaagtcggccatgatctgatcgaacatcattccggcggcccgcgtgaactcggcaaggatccggtttccggcgggaccgtggaagtgcgcaacggccgtttcggaccgtatgtcgcgctgattatgccacagtcggaagccgccggagatgccgccgctacgcaggccaagccgcagcgtggctccaagaaggccgcggcggatcgcccgaagatggcatcgctgttcaagacgatgagccctgaatcgttgacgttggaagatgcgctgaaactgctgagcctgcctcgcgaggtcggcacgtacgaggaggcgaatgccgaaaccggcgaactgcagcaggtcacggtaatggcgaacaacggccgctacggcccgtacctgaccaagaccggcgccgacggcaaatccgacacgcgttcgctcgcctcggaggatgagattttcacggttgacctcgataaggccaaggagctgttctcgcagccgaagtatggccgtggtcgcggccgtggaaccgccaagccgccgctgcgtgatctgggcgtcgatccggagactcagaagcatgtgaccatcaaggaaggtttctacggcgcgtatatcaccgatggcgaaacgaaccgtacgctgccgaagcagtatgcggccgaatcgatagagccggccgaagcgttcaggctgttggccgaaaagcgtgcgcaggggccatcgaaacgtggtcgtgggcgtaaggcctccgccaagaagacgactgccaagagcacaaaggccggtaagccgaacgcaatcgaaaaggcgcgtgccgatcgccgtggcaaggtgcgcgaactggccgatcggggctgggcgaatacgcgtattgcgaaggagatcgggtctacggccgccacggtcaaggccgatatcgactggctcaccgccaatgagggatattcccgccccgaggtggtccccgcccgttgattcctgtcgatttgtgcagggtctaggaccggagcggaccggtggggagtcacggtacagtgatggatatgcagggcatgttcatttctttcgaaggcgtcgacggcgtaggcaagaccacgcaggtcgagcgattgcgtgcgcatatcgaagcgcaggggcgtgaatgcgtggttacgcgcgaaccgggcggcaccgcgctcggtgtggccattcgcggcatgttgctgcatggagtcgccgctgccgatgcgggggttcccgcgaacaaggcggatgggggacggcagccggagcctgccgacatcgctccccgtaccgaagcattgttgttcgcggcggaccgggcgcagcatgtggccgaggtgattcgtccggcgcttgaacgcggcgcggtggtgatcaccgaccgttacctcgattcgtcgttggcctatcaggcgggcgggcgtgaactgacgcttaaggaaatccgggatctcagcctgtgggccaccaatgggttactgccggaacgcacatatctgctggacatggatccggccgcctcgcatgcacgactgcggcacagcgaggatcgcatggaatccgccggcgacgatttccagaatcgtacgcgcaacgccttccttgagctcgccagggacgaaccggaacggttccgcgtaatcgatgccagccaatccatcgaagaggtctggcagcggatcgaacacgatttcgctgcgatcgaccacctgcggccaaccctacggtcgacggtttccaccggcgagaatacggaaggaatcgcacgatgagcgtatgggattccatagtggggcaacgtcaggtggtggagcagctcaagaccatctcctgtggcgatccgaagtcgatcgcgcaatcatggctgatctgcgggcctcccggatccggccgttccaatgtggcgcgcgccttcgcggcggcgttggagagccccgaccatggccttggcgacgaaccgaccaaagtcacccagcaggtgcttgccggcacgcatcccgacgtgaccgtactcgccacgaataaggtgaccatcggcatcgatcaggtacgcgacctgatcaccacctccgagcagatgccgagcaccgcgccgtggcgaatcatcatcatcgaagacgtggaccgtatgctcgaacgcaccacgaatgtgttgctgaaggagattgaggagccgagcgaacatgccatctggctgttgtgcgccccgagtgcgcaagatgtgctgccgaccatccgttcgcgcacccgtatcgtgaatcttgccgtgccgtcgaaccaggccgtggcgaaattcctcgaggagacttcgcaggtcgagccgaaaatcgcggcccgtgcggcgcgccttgccgaagggcatatcggcatcgcccgactgtacgcctgcaacgagcggatcatgtcggatcgtgatgagctgatcgtcggtgtgctcaatcttgcgaaggcatccgatgcggtgttgctggccggcaatctcatcgacaatgcgaaagcgcaggccgaggcggatgtggaggtcaaagccgccgccgcggaagccgacttccgtagaatcaacggacttggtccgaaggaccgcattcctccgaaattgcgcggcgcctacaacgccatcgccaaaaaagacgagctcaagcgtcaggccacgcgcctcacgcgtgacgtgcttgaccgcgcactcaactcggtggcgagcatctaccgtgatgtcgccgtgttgcagaacaacgccgaggatgccgtcggcctgatcaatctcgagaaccgctcctcgatcgccgaactgtcggtgcgtctggatcgcgccgcggccgtacgtcgactggaggatatcgctacggcccgcaggcgtctcaacggcaacggcaatcccacgttggtgttcgaagccttgttctgcgccctgattccgtaaggttgatccgtacgttccgtgcattccagtatgggaatcgtcggcgtccctagcgtgcgaccacggtggaatcgcggacgataagctgcggcggcagcgacacatgcgccggatgctccggaccgagcgcgatcagacgcaacgcctccgatacgatttgctggaacggcggacgcaccgaagtgagcgtcggcatggtggtcgaagcgatcggcgaatcgttatagccgacgatcagcacatcctgcggtacacggagtcccaaagcgtgcagcgccaccatcatgccgaacgcgatggtgtcatccgcgcagaccacggcctccggctgcaccagcggctcggagaacaggcgcattgcgcagtcgaaaccacgttgcacgctgcgctcgccgaatcggttccagtcggcctgcgtcttcagatgatgcgcgcgcacctgcgtatggaacatggcgaacaattccgccgattcgaaggagatctccttgccggccatgtaggccacggattcgatgccctgatcggccagatgcccgatggtcatctccatggcggcgtcttcgtcgatgccgaccatcgatgtatggaaggaacgttgccggcctccgacctgcacgattggcagggtgccggcatattgttcgaggatttcggtgagatcggccccggccgcgggcactacgatgagtccgtccacatgacgtgcgacgagtgatgcgatgcgttcgccctgtgccgcttgattggggcctatgccgagcaacagctgttgcgagtccacgtcgatggtcggctcgatttcgtcaagcagctgcgcgctgaacgtttcggtggcgctggggatgaccaggccgatggtgttggtgatggtgctgcgcagtgcgcttgccgcatagttgacggaatagttgagctgttcggcggctgcgcgcacacggcgggcgatgtcgtcgtccttggtgcgtttgcccgacaatacgcgggaaacggttgcgatcgacacgttcgccaatgcggccacgttcgtaatcgaacggttgctctcgttcctgcctgccatgttttcctccgtcatgcggtcctgttggcgattcgccgcgcgatcccggtcgccatgcgcgaacgacgggacctctcaagaatagaacagccgcccgtcgaacatggcgggcggctgcaaggaatcggcgatgatgatcgggctcacgcggcgttggcgaggatgccgatcagcttgtcggcgcacgcatcggcgtcggtgccttcgacgttgatgaccacggtgtcgccctgcttgatgcccaggcccatgatggacaggatggagcctgccgggacggcgtcgccgccctccttggcgatggtcacgttgcagttggaggcggtgacggcctgtgcgaactgtgcggccgggcgtgcgtggatgccgacgggatcgttgatgacgagattgcgggttgccatagtgacactcctttgagtcgtgatagtgcttggttgcgttcttcaattgtgcaggaacaacgcggcagtatgatgccgctcagcgaaaagcataccactttttcacgaaacgcagaaaacgttttcctttttcgtattaatgaatatttatgtatactaacggcaggctgaaaatgatttaccggcaatgacggtggggatcattgcagtaacccccgtactcctcgacggtcgcgccgtatgcgttcgtcgggacaaccaaggaaccaggaaaaggagttctcatgaacatcaagggtgttggcatcggtcgtggcgttgcggtcggaccggttattcgcatggccgctccgctgcctgaaccgtcggacgcaccgcgtgccgaaggcatcgacgccgaaactgaaatcatccgcgtcgagcgatcattggcattggtgaacgccgacctcaaccgtcgtgcggaagaggccgccaatggtgacgaaggcgcccaaaaggccgctccgattcttcaggccatcgccatgttcgcctccgacccgtcccttgcgcagtccatccggaatctgattggccaaggcaagactgccgagcgggccgtgcttgaaggtttcgcggccgtggaagacatgttccgtgccatcggcggctatcaggccgagcgtgcggccgatctgcatgatgtcggtcagcgtgtgatcgccgacctgatgggcgctccggcgccgggtctgccggtgagcgaaaccccgttcgtgctcgttgccgaagacctgtccccggctgataccgccgcgctcgacatgagcaagaccctcgccatcgtgacctcgcagggcggcccgacctcgcataccgccatcctggctcgcgcccgcggcattgtggccgtggtctccgccaccgaagcgaccgaactgaccgacggcaccaacgtgatcgtgaatgcagccaaaggcgaaatcaccgtcgaaccgtccgaggaggaaatcaccacggcagaagcggccaagtctcgcgccgcggcggccaaggaactgcgtggcaacccgggtgccaccaaagacggccaccgcattccgctgttggcgaatgtgggcaaaccgtccgatgccgccaccgcattggaatatggtgccgagggcgtgggcctattccgcaccgaattcctgttcatcggcaacgccgaaccgccaagcgtcgaagagcagaccaaggcctatatcgagttgctcagccagttcccgggcaagaaagtcgtgatccgcatgctcgacgccggcgccgacaagccattgccgttcctgactccggaagacgagccgaaccccgctctcggactgcgaggcctgcgcaccttgaaggcccatatggacgtgcttgaaggccagctcaaggccctcgccgccgcggatgccgcaaccgacgccgatctgtgggtcatggccccgatggtggccgacgagcatgaggccgactacttcgtcagactcgccaagagccatggactgaaattcgtgggtgccatggccgaagtgccatccatcgccctgatggccgacaaggtggccaaggtggccgatttcgtctccatcggcaccaacgacctgacccagtacacgctggccgccgaccgtaccctcggttccgtggccaactaccagaccgcatggcatccggctgtgctgcgcgccatcaagatgatctgcgacgcgggcaatgccaacggcatgccggtgggcgtgtgcggcgaggccgccgccgatccggatctggccgtggtgctggccggtttgggcgtcaactccctgtccatgaccccggtggctctggacgatgtgcgcgccgcgctcgccgaggtcactcttgaggaagccaaggccaaggccgccgcagcgcttaacggcgactactacaatccggccgaccgctgacggtaatggcggcggttatggttttcggccgcaaaagtgcactcgttgttgggtgacaggctggtcctcgcaggttaggccctccaacacatgtgtgtaagggcctgacctgcgattaccgcggacttgctcgcaggtcaggactccaaatcctcgtctttggggcctttgccgttgagtaacaaactggctctcgcaggtcaagcccccgcgccgcatcaatgatgtggcggtatcgtgcgtcacgtgtatgcgcgatactggagacatgaagatttccgcagattttaccgtcattcccgacacgtttgccaaggcggcgccgcctgagaactgcatcgacggcactccgatcgtctccttccctttctacatcgatgagcttgactcgtcggtgcagttcctgcattgggaattcgttgatccggattcgattccggtatgcggcttccaatggaatcactggtcactggcgaatctgccggttgatgcgctgatgtacgacttcaatgattcccatgcgctggcgattccggccgatttctcccgtaccgtttccgcgatgattcccgaaaccgtgcaaggccgcacgtccgccgcttcgccgctgctgaccggtcgcagcaccgatcccgcggtcaccatgcgttacaacggcccgtacccaccggatcgggatcatgactactacctgcatgtgtggggtacgacggcaccgttggccggcctcaatcagggcttctggctgaacgaaatggagcgtgccctgcgcaatggcggcaatcccattgatcaaggcggcatcttccttaccggcaaagcctgatcgctgcccctcggcggcggaatccgaaccatgtcgtcttccccgccggcgaaaccgggaggcgcagaagcctgacatgttcccgtaagggagaacaatcatcgaaaggaatacacagcaacatggcgtgcaccacgattctggtcggcaagaacgcaagttatgacggttcgaccatcatcgcccgcaatgaagacagcgcaaacggcgaattctgcccgaagcgtttcatcgtagtcaagccggaggagcagccgcgtacatatcgcagcgtgctctcccatgtggaaatcgacctgccggaagagccgttgcagtacacggccgtgcccaatgccgatctgaaggaaggcatttggggcgaggctggcgtcaatgaggcgaacgtggccatgagcgccaccgaaaccctcaccaccaatgagcgtgtgcttggcgcggatccgttcgtcgaacttgctccggccaagggcagggaaggcgaggacggctacgaaccggaagtgcccggcggtatcggcgaagaggatttcctcaccctcgtgttgccgtacatcaagaccgcccgtgaaggcgtggagcgtctcggcgcgctgcttgaagagttcggcacctatgagatgaacggtgttgccttttccgacgtggacgagatctggtggctggagaccgtcggcggccaccattggattgccaagcgcgtgccggacgaggcctacgtgaccatgccgaaccagcttggcatcgatgaattcgaccttgaggatgccctaggcgatcaggaggagcatatgtgctccgccgatttaggcgagttcatcgcgcgtaaccatctggacctgtcggtggagaacaccacgccgttcaatccgcgcgacgctttcggttcccactccgattccgaccatgtgtacaacaccccgcgtgcttggtacatgcagcgcttcctcaacccgtacgacgagcagtgggatggtccggacgcggaccacaagccgaccgccgacgacattccgtgggctcgccagccggaacgcaagatcaccatcgaagatgtgaagtacgtgctgagttcccattatcagggcactccatacgatccgtacggcaagctcggcgaccagcgcacgcgccacatgttccgcccgatcggcatcaaccgccaaagccagcttgcggtcatgcagattcgtccgtatcgcccgcaggtcagccgtgcgattcagtggatggcctatggctccaacccgttcaacacgttggtgccgttcttcccgaacgtggattccacgccgaagtacctggaagacaccactgtgcgcgtcacctctgagaacttctactgggagaaccgcatcatcgcagccctgtgcgacgcgtccttcgccgataccgccaacgcggtggagcgctatcaggaaaagaccggcgcaatgggccaccgtatggtcgcagccgccgatgagcagatcgataggctgtgcgaggattccgatttcgacgccgagttcgatgcagatgatgaaagcgccgacgtgcagccgatggaaccggatgagatcatcgaagccacccgcaacgcggaagcacgcgagattcttgccgcagccaaccggaccatggccgaccagctcaaggaggagaccgacaagctgctcgactccgtgctctacacggcgagcatgaacatgaagaacggcttccatatgtccgacttctgattcgcggtgttatagggagagacgccaaccccctctgtaacgcgcggccactacaatgatcttcatctttaatcccagaaaggaaccccagtgaccaacattgaggatttcaccagccagtacggcctggttcagaagattgatgcgttcgggtatctcgattatctgaagaacaatccggatgccccgcgcaagcatggcaaggtcgtgctcgtcaccgccgacactccgctgaaggcgtcacgcggcgaaggcaagaccaccaccacgatcgccctgatcgacgccctgcgtgagcgtggcatcgatgcgaccgccgtgctgcgtcagccaagtatgggcattaccgcggccggttccaagggcggcgcatcgggcggtggcaaggcatccctgacccacccggagttgatcgactggggtctgtgcggcgagatgggtgccatcgaggccgctcagaacctgctggtctcctttgcggagaaagcgatcgacgagggcaagcttgatgagattctggtgccgcgcgtttccgaagtgccgtcccgctccctgcgtcagatcgccgtggatcgtggtaagggcaacgttgcggaacgtacggtgctcaccccgacctgcgagctgatgcagatcgtcgtgctgtctcgttccatggacgaaatcgccgatcgcgtggccaggatgatcgccggcaccaaggacggcaaggccgtcaccttcggcgaattcgttgacctgtggcgcatcaccggcattctgtccgacgccgtcaagcccgccaagaccgagaccgtaaacggcgccccggtgtatgtgcatggcggcccgttcgcgaacgtgtccatcggcattccgacgctcgtttccgtggagatggcctgcgccctgcacgacgtggtaatcgtcgaggcgggttatggtgctgatgccggcgcccagaagtggctcgacatcgcatgccgcgagtacggtgcgcagtggccgtccgccgccatcgtcgtgacccgtgcctccacatggcgtgatgatccggcgcttgcctggcgttatccgttccatgtgcagcgcttggaaggccttgatattccgacgttcccgctgatcaacctgtgggatggcgaggacgatcagattccggcgttgaaggcgacggccgaagagctggaattccgtgagccgatcatcggcaatctgtaccgtgacggcggcgacgcgctcgccccgcagctggatgccttcgtggatgccgtggtgaacggttccatgcctgcggaaccgcacagccacaagggcatggctctcgtggagaacgtgcgctgggtggccgagaacgcatatggagttccggctgagcgcgtggttctgaaggacggtttcgccgaatcccttaacgaggccatgaatctgtgcgccagcgcgggcatggatctgggtgatatggcactggtggcggtgaagtctccggccaccatgaccgataacgattccgctccggaggaggaacgcaccgtgaccttgaagaaggtcgaagtccattccggtgccggcttggtgcatgtgaatctgactacgtccctgactacgccaatgccgaagatcgtctgattccacacgattgcgagtaatgatcgcacgatgacggacgcgaggagccgccgatcccaagaggtcggcggctcctcgcatgttatgctgcggcgtgtgaggaaacggcggaaagattagcgtttagttgccgctccttcggaagaacggtggaattgcgtcagaaattgccgccgttccagccccaatcggtggtggcggtgtatcggatgtaagtacggtcggccggaatgccgagctccttgcccagcgcggccatgatctgttcggtcagcttttcccaagcggaacccggcacggaacggccgaaaacattcacctccacgtacgcggccggttgggaatcgtcaccgccgaaataaatcggcatattgtcttcgaacgggcacatcagccagccttcggacttgcccggaacggcggtgattgccttgccgtaggccgttttcagggcctcacgctgttcgggagtggtggagacggaaacgtgggtgtgaatgactggcattggtcctccttggtcggtgaaatgctcgtggacaattcacaccattctaagtccggtctgtgtgcgtgtgtttaattgtctgtgtgagaaaactgattgaacagcttatgaaattcggtcttgtaggtgtgatcgccttcgttatcgactggggcatcctgaatctgcttgttggcgtcttccatatgcataacgtgatcgccgcgacgatttcgttcattatttccttgattttcaactacaccgccagcatgaaactggtgttcaaaccgcgcgatgacatggcccgatggatggagattctgattttcgtggtcggcgccgtgatcggtctgctcatgaacgacgcccttatttgggtttccacgtacggcatgaatcatgatgcgttcgttacgcagcataccgaatatctgattcgcaccaacgtgggcaagctcttcgccaccgcagtggtgatggtgtggaacttcctgacccgtaagtggctgcttgatgatacgcataccaacgccatgaaccgcctgaagaaggccgagaaccgcttgagcgaagaggagctggaggccaagtggcagaacagtttctcgcacaagctgggcgtttggtcgctggagcacactcccaaaggctggccgaagtagggcgccgcgcggtggcttcgatatgaaacggtcctccttcatcagagggaggaccgtttgcttgtccggcggatcattcgcttacgaaagtctccgctttacacgcctttacacacgcacacgttcacacgctcacggacgtgagcatgggctgctcggtggagtccttgatctgcttgaatccgaacagggcgatcgccagcgaagccaacgccagcacggtcacgacgaggaagccgccgtgcgaacccatacggtcgatgaactgacccgcaatggccgaacccaccgatccgccgatcgaattcatcgcacccatccatgccatgccttcggtaaagcgggtgggcggcaccagatgcagcatcagctggttgccattcacccaggtcggggcctggcatacgccgatgagcaggtagatgatcataatcacccacaggtgcttggcgaacatgaacgagccgatgcccagatccactaccgccaggcagaagtagaagcgcttccacagtgggatggtccagttcttcgcgccatatacgagtgcgccgatcagcgaactgaacgagaagcatgcgaacacgaagcccgtgtactgcttcatattcgcttccgtggcgaaagccacaatggaaatgcccgcagccgattggaacgcgcccagaccgaaccacgtcacgcatacagcgatcaggcccggaccccagatggactccttgcggcccgccttcacatcggccgcggcctgttccatggcagcttgcacttcggcggccgtcttgccttcggaacgtgcgcggtcgcgcgcgtactccacggccgcttcggcctgcaacgccttggaacgtgcggtctcgcgctctcgatattccttgcgggtcatgccggcctcgcgtgccagctgcgtctgtgacttcggttcggtggtcagttccgtcaggaacatcagtgcgccgaccaccacgcacataccggtgaacgaaaaggcgagcacaccggaaatcacggccagcgtggaagcgagcggattgccgatcacccacatgcattcgtcgaacacacctgacagcgacaatgcacggttcgtcttctccgaatcgcctttgagcagcgtggtccaacgctgacggctcatcgcaccccacggcggaatcgcggccatgaacggtacgatgcagaacaggatccacgacggaacgcgggcggtgatgcatgacaccagcgcggtcgcggcgaccatccacacgatgatcgtcggaatggaaacctgacgctgcccgaacttgtcgaccagcttgccgagcaccgggcttgccacggccaatgcgatcgcctgtactgcagtgagtgcgccggccagcgaatagttgccgtagtaatgctgtacggcaatcgtaatggtcatgccgaccatcgggaacggcatgcatgcgattaccgagccgacggaaaaacgggcggtatgcggtatgcgaagaagttccgcataccctccgaaaagacgatggccaacgcttgtgacgccggcgaaaacctgattggtcatgctctgccgctcctttctgctcacggttcgcgtttccccgcggctttgcgttgctgcgggctgattcgttcctctcatatatcccacttcaactcggcttgaacgcaagtcgggtccggcagtgtgtcgtcaagaggggtttctggattatggtgccgtgatgatgatgcggcacggtctttgttgaccacaggcaactctatgcgtaggcaccgtcgcaacacgcggtagattagggctaggaaaacaaacgatcaggtaaattttttagttccggcgatattgtcgcacaatgatcgacgcagatgccggagccgtcccggcagaaaggtggcatccatgcatgcaacaaccatccacttcgtgcgtcacggcaaggtcgagaatccggagcatctgctctacgaacgtcttcccggattccacctgtccgaattgggagtgcgtatggcgcaggctaccgcgcactacatcgccatcagtccgcaactgaacaccgtttccgccgtctactcgtcaccactggaacgtacgcgtgagacggccggcgaaatcctcgaatccctgaacgccgtgcgtgggctgcgtggcgagaagccgctggaactcgtcaccgacgaacgcatcatcgaagccggcaacgaattccgcggcaagcgcatcggccacggcgagggggcactgtggaggaacggcaactacaaactcgtgcgcaacctgtggaagccgagctggggcgaaagctaccagtccatcgcgcatcgcgtgcaggatttcgcattggagaaggtgtccgaacatcctggtgagcagatcgtggtggtcagccacgaatcgccgatctggagctaccgtcacatgctggaaaccggtcatccggaacacaatatgctgctgcgtcacaccgcgctcgcctcgattacgtcgatcacttacgattgcgccacccgcaaagtgatgtcaatcacgtatgtcgaccccgccgccgacgtacagtgagtggcacaatggaagagggtctgcaaagaggggctcgcggaagcttgtttgaggcgggtttccatgtgatgattggcttgacggaagtcggtaccgcaaaggagcattatgacttttgagattgacgattcattggtggcccgcgtctccgcattgccggtcgttatggatgcggcgaacgtcggggtttcgctgatttcactatggccgttgcagaatgcccagcaactggagaacgacgccgattatgcggaagggctgcaggtgcggttttcgttgcttatggcccttgccatgctacgcaactccgacaaggtgaacatagccgccgccgaagccgtatacgacggtatggaagtgattcccggctgcccgctatgggtggtcaacgcgctgcttgaggccaatgacgcctacgattgcatgtccgcgtactccgcgaccggcgacattcagctggtgttcaaggcggccgactacctgagcatcgtgttggacgacaaaaccaagaccgcgatggaggaggtgctgagcaccgtggccgccgaggtcgcgaagaaggcgcaaggttccgcgtctgccgatggcatgacggacgggggtgatttcgacgcagtcgccgccgccgaagcatgcctgtcgacgagcacgaatgccgatgaggtcgccgtccggttcgcttcggcgctgatgatctgcgacaagctgatgaacatcatgtgcgagggcttcgacgatgtgaacgatcaggccattcgtgtgctgccggtactgctgtacgtcaacgagctgcgcgagcagttttccgttccgcgcattttcatgacgtacccgcaattgctggaactgctttccttgcgcaagacggcgcatatgatcgatgattccggcgcgactgcgaccatcgacaacagcttgggtacgctcggcgtcaccgcgcagttcgtcggcatgctggccgctcaggaatgggcgtaccaccgctgtgagattctgtgggatccggaggaggccaaaagaaaggccaaggaagaggacgagcagaaaagcaaggaagcgctcgctgaaaagttcaagcatgtcaaagacgatccggacaagccccagattgatttgtgagccgatagagctgagtcggtgcggctgagcaggcaaagcgaagtcccggcactcacattgcgtgatgtgccgggactttcgttgtgtgctggccatgtgccggtcatgtgccggctaccgatgggccttactgctggtcggtgttgttgccgtacgggttctgtccggtctcggattggtcagacggtgcggccggcagcggaacgtccgggatggacgggaccgtcggggtgaacggagtggcctgtgcggtcggtgcggccgaggacgtcggtgcggcaggaacgttcatgtcgggcgtcggggccgcgtagttcgcgtactggttctgcatggccggtgccgtcggagcgtagcccgcggtggacggatcatcgaagcgcacgccggccggatcgctgcgttgtgccatgaacacgatatagacgatgcatccggcgatcagcacgaggctgccgataatcgtcaggatggcacccgtggccgcagtgctggtgtctccgctatagatcgcattgaccgcgccgatgccggtcatcgtggtgccggcaatcgtcaggatgtagccgaccagcaagacgccgtagcagacggcgactgaccagcccgacttattggtgtcgtgcattcgacgcacgctcagggcgaggttcggaacgagcgtcgccagagaccacaggcccgtgacgactctcgagatgcgtagcgtggcgtagcttgcggaatgtccggcaatcgcgccgaggaggccgaacagtagggagatggcgaatacgatgatgatgttgcacagcacccaccaccagaattcgcctcgggatgcacggcccttgaatacggcgtacttcttccagaagcgaatgaaggattcgcccatggtgcagttataggccggctggtcgagcggtgcggtcagcgcaaagaaattcgagccttgcggggccggctggccttgcggagcgccatattgcggtgcaccggtattgtggggctccttgctggggttgctggtaggagccgtaggcattgccttgctggctttgcccggactggccgtactgattctgctgcggcatggactgtccatactgcggcggaacctgtgggccgtactggttggggtccgtcattgtttaccctttctagataaataaacaactcggagcatagggtctagttagctatgctaccggtagcgtgctactgatttttcattgttccgcctatcgttatgcggataagcggcctaagggggcggattccggtgaggggaaagacgatttccgccctcatgcacacgtccggttaacgcggcacaatggagcctatgactgaagctgaaaacaccaaaccggaactccccgagaatgtccgcgtgcgtttctgcccgtctccgaccggcatcccgcacgttggcatggtccgtaccgcactgttcaactgggccgaagcccgccataccaagggcacgttcgtgttccgtatcgaggatacggacgcccagcgtgactccgaggaaagctataaccagatcatcgaagccctgaactggctgggcatcgactgggatgaaggcatcaacgtgggtggtccagacggcccgtaccgccagtccgagcgcacccagatctacaaggatgtggcggccaagctgttcgaagccggctatgcctatgaatccttctccactccggaagagatcgaggcccgtaacgtggccgccggccgtccgaaggcctttggctacgatggctacgatcgcaatctcaccgaagagcagaaggcggccttccgcgcagaaggccgtaagccggctttgcgcatccgtatgcccgatgatgatgtcgccttcgacgatctgatccgtggccgcatcgaattcaaggccggttccgtaccggattacgtgatcgtgcgtccgaacggtgatccgctgtacacgctgaccaacccggtcgacgatgccatgatgaacatcaacgtagtgctgcgcggtgaggatctgctgagctccaccccgcgtcagatcgtgttgtatcggtatctgatcgagctgggcatcgccaaggagatgccgctgttcggccacatgccgtatgtgatgggccagggcaacaagaagctgtccaagcgcgatcctgaatccaacctgttcctgcatcgcgacaacggtttcatccgtgaaggtctgctgaactatctggcactgctgggctggtccatcgctccggatcgtgacgtgttctccatggacgagatgatcgagaagttcgacgtgcgtgacgtcaaggccaatccggcccgtttcgacatcgacaaggccatctccatcaacgccgagcacatccgcatgctcgaaccacaggatttcctgaaccgtgccgtaccgtacctgaaccgtgacggcgtcgtgtccgccgattcctgggatgcgctgaccgatcgcgaacgtgagatcctctccgcttccgtggagctcgtgcagccgcgcgtgcgtctgcttggcgaggtggccggcatggtcggttccctgctttccgccgaaggctatatcgagccggatgccgatgcgcgcaagcagctcaaggattccgcaccggctgtgcttgatgcggccattgccgcgctttccgctgtggctgatgatgattggaagaccgacatcctgcatgagacgctcaacaaggcgctcgtggaggatggcggctacaagccgcgtctggcgttcggcccggtgcgcgtggccatgtccggccgccgcgtatccccgccgctgttcgagtccatggagatcgtcggcaaggaaatcagcctcgcccgtcttcagggtttgcgcgagcatctgtgatgtgatgccgttcccatgccgctccttccgatgaaggggcggcattttcaaatcgttgaaaaatggcgcgacacgccgtgacttgcgcttacccactaactcgcgtatattaatcactcgttgcggttcgcggcctagctgagaatcacaacgataactcaagcccccgtcgtctagcggtctaggactacgccctctcacggcgccaacaccggttcaaatccggtcgggggtacgacggacaacttcttgaagttgccacgccagccaaattgggatgtggtgtaattggcaacacagctgattctggttcagccattcttggttcgagtccaggcatcccagccaatgagccctcgcggaatgcgagggttttttgttttcttaacctatgatgacgtttggaattcgtcggtgctgttttgtgcgttcaattgcgtgcataattgcactaccctagggattatgactgaattgcagcatgccgccaaagccgcgtccacgcgcccgcgtatccaacccgcggaagagggggatggtcgtccgttgtccgtatcgacacgtctcggccgtctgcagtttcatcaatccggcaagtttcgcgtgctgcagttcaccgacattcaggatggtccgaaggtcagcaacgacaccgtcaaactgatcgaagcgtcacttgacgccacgcgccccgatatcgtcatcttcaccggcaaccagatcgccggctatgatgccgcgtactcccagaccatgcgtaagcgccgctggaacaaggcacaggccgccgtgcagtcctctgccgaacggtatgaggaggctctcaggcaaacgcgttcgatggtccgctccacgatcgaacagctggtgcgaccgctcgccgatcgtagcgttccctgggtggtgactttcgggaatcatgattttcaatgcggtttggataatgccgaggttgaacggatctgccaggaattccccggctgcctcaatcctgcccctactgagacgagtgccggcgaaaaggtgggaatgttgccggaacagcgcgtgtacggatgcgaaccgggcacattcgccttgcctgtgatgaatgttgatcgcacatgtaacgtactgggattggtgctggtcgattcgggcgattatgcgcgttcgggcggctatggaagcccgtccgtggccgcattgcgttttcttgccgatgtgccgcatgcgttggtcacgcaatcgcaggcgattgcggcgcctcgggagacgcaggcttcgcaggaggcgttgccgtgcatggtattccagcattttgcgattccgcagtattatgacctgctgaagccggttgcggccaatgcggcgcgtgcgatcgaaggctatcgtaactttgcgggcaaccattacgtgttggacgagagcaagacgcagcccggcagctatctgggggagggcatcagctgccccgatgccgacagcggcgagtatgcgatgctgtgcgacaacggttactttgccatttccgcaggtcatgaccatcgcaatggtttcgtcggcacggtcgcgattcccggcactcagaccgctgaacagaccgctggtgaatgctcggccgaaagcgaggcgtctgcaggagctcatggcctgatgatgatcgcctcgccgaccagcggattcggctcatacggtccggtgccggaaaagcgtgccgcgaggctgttcgaattcgatattcgtcatccgtatgagccgcgtacgcaattgcttgaatatggtgagctggtgggcaagccaagcacgggcaaggcctatgcatacggtatgacgagcgagtccaggccggatagcgaaggtatggatctgctgcatcgcccgacttggtggagcaagctcctctcacggttcaggaaataatcgcgttaagattcagcggcctgcggaggccttgatcagggcttcggtgagatacttgccggcggccatgaccagcggcgcatagcggcgccctggattgacgcccatccgaccgttggggcccgaaatggagattgcggcgattacctgtccggaagcgttgcgaatcggtgcggagatggagcatacgccttcgtcgcgttcgttgacggactcggcccagccgcgcttacgcacggcggacaacttggccgcagtgaacttggcgtggcgaagtccctgatgcaggcgctcggaatcctcccaggccaagaggatctgcgcggcggaaccggcttccatcgacagcatggcgccgaccggaatcgaatcgcgcaaaccggaagcgcgctccacggctgcgatgcacacacgctgatcgccctgacggcggtagatttgggcggattcaccggtgcgatccagtaaggtctgcaaaattgggccggcggcggtgagcagccggtcttcgcctgcggcggcggccagctcggcgaatcgtgatcccaatacgaaacggccatgctggtcgcgtagcacgaaacgatggcgttccagcgcaatcgcaaggcgatgggcggtcggacgggccaagccggtggctgcgacaagctggccgagtgtggccgggccggactcgagtgcgtcgagaatctttacggtcttgtcgagcacgcccaccccggagtggatttcattgttttccgtagtggtctgataggggttctccgccggggtcgcagcgtcatcctgctgcgattcgggcatggtgatgcgcgtgttcgaagaagtcataagacggattatgccatctcacatattgaaatgcaaaacgcgcgtgatgtcgtactgaggtattgcggatcatttcaatccgcggtcggcaatcgaacaagtggaaaatcgttgcaatggcaaggattacgggctaggtggcaacgggccgtccggcacgtatctcatataccggcatactgcgtctataacccaacccaaaacccataggcttatagcacgaacagcgcgtgaaggcaatacccgcgcggaaaatcatgaggaaaaattcgaggaggtcccgtatgggaacgacattggccgagaaagtctgggccgatcatctggtgcgcaaaggtagcgatggggctcccgacctgctgtacatcgacctgatgctcatgcatgaggtcaccagtccgcaggcgttcgagggcctgcgtctggctggtcgcaagccgcgtcatatcgatcagttgatcgccacggaggaccacaacacccccacggtcgacatcgatcgcccgaatccggacgaaacctccgcgctgcagctgagcacgctggagaagaactgcaaggagttcggtgttcgcctgtgtccgctcggcgatgctgatcagggcgtggtgcatgcgttcgctccggtactgggccttacgcagccgggcatgaccatcgtgtgcggcgattcgcacacctctacgcacggtgcgttcggtgcgatggcgcttggcatcggcacttccgaggtcgagcacgtcatggccacgcagacgctgagcctcaagccgttcaagaccatggccatcaatatcgaaggcgaactgccgaagggcgttacggccaaagacatcattcttgcgattatcgcgaagatcggcaccggcggtggccagggtcacgtcatcgagtaccgcggcgaggcgatcaggaagctgtcgatggatgcccgcatgacgatctgcaacatgtcgatcgaggcgggtgcccgagccggcatgattgcgccggatgaggtgacgttcgaatatctgaagggccgtccgcacgcaccggaaggtgagatgtgggacaaggcggtcgagtattggaagacgctcaagaccgatgatgacgccgtgttcgatacggaagtgacgatcaaggccgaggatctcgagccatatgtgacgtggggcaccaacccgggtcagggcatcaggatttccggcaacgtgccggatccggaatccttcaacgacgagacggagcgcaccgccgccgaacgtgccatcgaatacatggggttgaagccgggcatgccgatcaaggacattgccgtcgacaccgtgttcatcggttcctgcacgaatggccgtcttgaggatctgcgtgtggccgccgccatcatgaaggggcatcacaaggccgaaaacattcaccgcgtactcgtggtgccggcttcctcccgcgtgcgtctgcaggcggagaaggaagggctcgacaagatcttcaaggatttcggtgccgaatggcgtaacgccggttgctccatgtgcctgggcatgaacccggacaagatggtggcccgcgagcgttccatctctacgtcgaaccgtaacttcgaaggtcgtcagggcaagggttcccgcacgcatctggcgtcgccagccgtggccgccgccactgcgatccgcggtaccatctgctccccggccgacctgtaaacctgcgcgaacccgcgaatcgtaaggactttcagatatggaaaaactcaccactcttaccggcgtggccgtgccgcttcgccgttccaatgtcgataccgaccagatcatcccggccgtgttcctcaagcgcgtcaagaagaccggtttcgatgacgctctcttctatgcatggcgtcgcgatccggaattcgtgctcaaccagccggagtacaagcagggcaagattctggtcgccggccccgatttcggcatcggttcctctcgcgaacatgccgtatgggcgttgcatgattacggtttccgcgtggtcatcgcctctcgtttcgctgacatcttctatggcaacaccgccaagaacggtgtgcttgccgcgatcatgccgcaggaatccgtcgagctactgtggaagctgctcgatgaggagccgggccgtgatatgaccgtgagcctggaggatcgtaccgtgacctgcggtgacgtgacgttgccgttcgaagtgaacgattacacccgttggcgcctgatgaacggctatgacgatatcgatctgacgctgcagcatgaggacgacattcttgcctacgagaagatgcgtgccgaaaagttcccgttcaagccgaagaccctgccggtcaggcgcgaaccggagcagcccatcgaatccgcccgcgaaggcgaataccctgattggcagggtccgttggccgatcgcggcattatttagccgcggtggccggctggtagtgcggtgcactgccggcagggccctgcctgagcgaggcgagagccgagcgaaggtgatgatgggtccgcgcgtagcgcggtccgtgattgcaggacgggtccgttggccgatcgcggcattatttagccgcggtggccggctggtagtgcggtgtagtatatgggagacgtacagtgcattcgccaatacggaaggcggcatgattctgctcggtgtctccgagcgctccgatcattccctgcacatcaccggagtcgacgatgcccacaaactggtgcaggatttctggaacacggtgcatgattcctcaacaatcagttcggtggtgctgagcgagaacgatgtggtggttcgtcataccgggcaaggggatatcgtgtccattgacattccccgtgcatcgagagaacgcattcctgtgcatgtcggtcccaatccgttgaagggctcataccggcgtaatggcgatggtgattatttgtgcgactcggaaacggttcatgccatgttgcgagacagcgatctgcgccccttggacaggaaaatcgttggcggatgaggtgatacacggaggcatttccgatgcccgcaatcccatactgatgaaaatgttcaaccttatcggcataggggagaaggctggcagcggttttgatgttatgcgggctggttgcgatttcgcgggaaccgcataccccgagttggaggttggcgagcatccggacagggtgacgcttacgttgtatccacgcaagattcaggattatggtgccgttgagggcggcggaatctcaactccttcgggttctgcggtttcggactttgcggtttcgggttcttcgattcctgtgggttcaatggccatcgcatccgcaggcaccgccactcctatcaccgcaacgggagcaaatgcgacatatgccccgaacggccgtcggatggctgaagtcggagaagatgccgggggcggtcagcgatcctcaatacggttcaatctgggtggggcatccttggtggcgcagcccatggagccacaatccaacgtggagaaaatcacacgggcattgacggctggcggcccactgcctacctcgcaattggcgaaggtgctcggtttggggcttacccgtacccgtgagattctgggttccatggtgggtgaaggcgtcatcgaacccgtaggagtagggcgcggtcgcaaataccagattgtctccgacaaggccgcatgacctacgggtccaggctgaggccatgggtcacagaccgcgagtcacaggtccggatcgaggtcggcggtgggaaaactggcccacggataggcgggcaggtattcaccatagtaggtgttgacggcgtaggcactgccatgcaacatgtcgaatagatcgcaatgcacggtcaagccatcaatcggatccgtcgaaacactggtggtgttatgagagtggcaaatcagcttgccggcctgcgggtgcaccgtctgcaatgtgcgccgcagcgacttgacaaggccacgaatccgcagtgataacgcgaacgcatgcttggggcggcctgcataacctgattgccgttccacgcgagtggcgcctgcatcgcgcgcatccgtggaatcggcatcaaccggccataatgcatccgcgatccgtgcgtcggtaagcggcgcggttcgcgcatgaatcagcaaggccaacagatccttggcctcctgggactcccacggaagcggttcatgatgatgaaacgcttcaaaatcgccgaatgtgcgaatcatcagctgctcgtgcctgccattcgcggcgtcggtcggaaactcgccgcgatacgacggttcgcgccgcaacacatcatcaagtgcagctacgcaatcacgaatatcgccctccatggcgggtttcatgacgaatccggtgttgctatcgccccgcaatccgaaggaataatcggcataagccgttgaaaacacgattttcgtatgcggactgatatctttgatcgccttcgccagccgtagtccgttctcgccccgcaatcgcaggtccagaaacgcataggcgatattcgcgcaggaggcgaccgcctcgcgcgcaaacgattcgacttcctgggcggtgccgaatcccctgacctgtgcgtcgggaaacactgcgtgcagcagtctcgtcatgctgttgaggatcaaaggttcgtcgtccgccgcaatcacatacatgctcacactctaacccacaatcggaaggtggtccggaaggcacccccggaaggcgctctcggaagatggaaggggagtcccgcatcacatccgtgccatctgacatacttcataaacagggggtatcccccgaaagagctcggagcaaaagcatgaatcatattcgacgtgcgttgacgtactggtacacattcggctaccccgaaatcaacagcccccattacatccgtaggctcgcatgcgacaatctcgacatggtgcgtcgatgctgcatgttctgtcagctgttcctgatggtcatgtgcatcacccgcctggcactggtgggctgcgagtggatcaatctatggccattcgtcattgccagcgtcatcgttacgatcattctcgtcatcaataaccggcttgacgacaccaaaaacgtactgttccactcgtatgcgcagacggcggtgttttcggtgaccctagtcgtcctggccggcttttacgacttcatcgccgctcccggttcaattgccgtcatgacctgcatggcgctgctgtgcgtcggctcgttgttcgacagccgcccaatcgacaatctcatcgcatatgccatcggcctggccgtgctatacgcgattgcgctcgccgaatccggtccatcgcttgtctcgaacctattcaacatggcggtttccgtactgctgggactgtgcatctcatggtacaaatcccgcagccacttcggccagctgctagcaaacgacaaagagctcaaagcgttgcaacatgccgcacgcgtgcagatcatggtcagtcagatcaatccgcatttcgtctgcaacgtacttgccaccatccaggccatgtgcgacacggatgtggacaaagccaaggaggcgctcggcctgttctccgcatacatgcgcgacaatacggacgccgtggcccgaacggaaccggtcccgttcgcaatggaactgcagcatgtcaaacggtacgtctcgttggaacagatgcggttcggcgacaaactcgccgtgatgtatgacatcgacaccacggatttccggcttcccgccctgaccgtgcagccgatcatcgagaacgcgatcaaacatggcatcggcaagaaggagaacggcggcttcgtcaggctgagcgttcgcgaaaggcagggcgtggtgcgtattgaaatcgctgacaatggcgtcggcatggatgagcgcacgttgtacggtctgaccggtagcatcctgcagaccgccgaaagcgtcgaccggccggagggcgatggccgcagccatgtcggccttacgaacgtgcgtgaacgtttgcggctgatgtcgcatggcaccctcgccgtgtccagccagccaggcaggggcaccacggtcatcatctccattcccaaaggaatatgatttccgatttcctgaattccctgcgacgacgtttgcggcgcgaatgagaccgagtctggcttggaccgtcccgcgcggtaaggtggttatgttttgccgcgcattcgaaagagcattcggggagagatatgagccaaggattcgcgccgttctatgacgtcaatcgcacgtatgaagacaattatctgcaagggccgttcggtgcgttcgccaaagtgctgcaggaggatcgcggtccttcggccgcacagtcttccgcacccgtccagaccgcttcgggtgaggatttcctcggcttccacgtgaacctgccgttcggcatccccgccgggccgctgctcaatgagaggttcacgaccgccgccttccgcatgggcttcgatctggccgtttacaagaccgtgcgctcgcgtgcgtggggctgcaacgcctttccgaacgtgctcgccgtgcatccgaaaaatgccgacggatcgctgattcccggcagcgccgagctggatgagggtgtgctggccgacacccgttacgagctgccgatttcgatttccaacagtttcggcgttccttcacgagacccggatgaatggcagccggatatgaagaaggtgatcgaggccgccggcagcggtcaattgctggtgccgagcttccagggttcgcgcgtggacggcatggatcaggatgattacattgccgatcatgtcaccaccgcgcgtcttgtctgcgaaaccggcgctggattgatggagatgaacacgagctgcccgaacgagggccacaatcgtttgctgtgccacgatccgcatttggtaggtcgcattacggaggccgtaaaaaatgagatcggcgaccgtccgctcgtcgtcaaactcgcctatattccgaatgatgccgacttggagatcatggtgaaggaaaccgccgcacacggtaccgtgcagggtttctccaccatcaacacgatttcggcgaaattgatcgatgctcacggcaatcaggcattgccgggagctggccgtgaccgttccggcgtgtgcggcaatgccatccgcggcgccggtctcgacatggtgggccgtctgcatgcgatccgtgaaaagctgggtctcgatttcaccatcgtgggtgtgggcggcgtggttcgccccgaagactaccgggcgtatcgtgaggccggtgcgaatgccgtgatgagtgcgaccggtgccatgtggaacgcgaatctggcccgtgacattgcaagcagcatctgaaaaccgaacaaaacggggagacactgcgccgaacgcgtgatttcacgagcttgctacagtccgtatggcaaactgaaggatagtgtgtttcaagtttggagttcgagggaaacgaaagaggtagaacgtgtctgaaaacaaggacgacattctgcacgtcgtaggcggcaagccgctgaacggcaccattaaggtacgcggcgcgaagaacttcgtgagcaaggccatggtggccgcattgctcgctcctggcaaatccgtgttgaagaacgtgccggagattcgtgacgtacatgtggtgtccgacctgctccgtctgcatggcgtggatgtggatgtggatggtgccaagggcattgtgaccatcgacgccaccaaggtgcagcttgccgacgtggccgatgtggataccctttccggatcctcccgcattccgatcctgttctccggtccgttgctgcaccgcttgggtgaagcgttcattccggcgctcggcggatgcaacattggcggccgtccgattgatttccatctggagaccttgcgcaagctgggtgcgaacgtggacaaggagcataaggacggtattcacatcaccgctccggatggtctgcatggtgcgaagattcatctgccgtacccgtccgtgggcgcgaccgaacagacgttgctcgccgccgtgcttgccgaaggcaagaccgagctttccggtgccgccaccgaaccggaaatcatggatctggtgtgcgtgttgcagaagatgggcgccatcatttcagtggatgttgaccgtaccttccgcatcgaaggcgtcaaggagctcaagggctatacgcatacttcgctgactgaccgcatcgaggccgcttcttgggcgtcggccgcattggccacgcacggtgatattttcgtcaagggtgccactcagccggagatgatgaccttcctgaacgtgttccgtaagatcggcggcgaattcgatatcaccgacaggggcattcggttctggcatccgggtggggatctgaagccggtcgccattgagactgacgtgcatccgggcttcatgaccgactggcagcagccgctggtggtggctctcacccaggcgaagggcctttcgatcgtgcatgagaccgtgtatgagaatcgtttcggcttcaccaagccgttagtgcagatgggtgccacgattcagctgtatcgtgaatgcctcggatctctgccgtgccgtttccagcagcgcaactacaagcattccgcggtgattttcggaccgactccgctgaccggtcgcgacatcgacgtgccggatctgcgtggtggcttcagtcatctgattgcggcgctgaccgctcagggtccttcgaatgtgcagggtatttccctgattgaccgtggctatgctgacttccgcggcaagctggaagccttgggtgccgatttcgactgattcgcaccttttccgtagattcctcaaaggccggtatttcttggaatactggccttttccataccttttccgtatatgttttccgctcctttgctgttccgtgcccatttttctatacctgctttcctgtttggtggttctgatttggtgatgctgatttgggcggatggttttcttggtgtggtttgttggggtggggctatcgggagctggcatgtggatgcgtgcttggggatgattgccgtggattgcatgagcatgttgttgcgcgcacgattctggttgtggtggttgctggcgggttgtgcgctgtgtggtcgttcgattcggagtctggcttgcttatgattgtcggggaatggccgtttccgggctttgcgggtcatgtcggtcctggtgatggcgaggcccgtcgcgaatgattcgggaatcgtcccttcctgccgggtcgtgcgtggcgtggttccgcgaatcgcggtcgaatcggtcgaattgcggtcgaatcgcggtcgaattgcggtcgaattaatctggctggcgattcgtgtaatgagatggagcgattaaccttgcggtggtctgtccattaaggatcacgttggtgtggactattggcaggggctacctctgtgcctattaatttctgacacgccgtattccccttgtgggccaatctgaaaacctacccattcctgtgtgcgtttttcaccccacattgggtgattccatgaacccgcctaccccctcctggctgagtagaaccattgacgacgggagaataatttcaatttcattgaagatgccggtgattttcgttgcgttccacgaaagagggtgttactctaggcactgtcggatagttacatgcgacggtgatggcgccataaatgagcatgtaaaagttgtttgtccatcgaattcccgagtaggccatacccatgtgacgggggaatgcgtttttattgcaattccaaagatcctccatcttagtagggggactgtgaggattgttgagggggagaacccgcttcgtgtcttaactaaagtcgaacggcagaccaagatttagaagactttaggtatagggactttcatgaggggcaattcaaacatgaccttacatagtgcggcctggcacaaggtggtggccgccttcgtcgccgtcgccaccctcctcgccatggtaataatcagtggcgttgcgtccggaggtgcatatgcggtcgactctggacatgatctaaaagaatatgtccacgacgtaaaggtgcagaaatcgacggacggcggtagtacttggtccgattttgctggcggtacgctgcaagaaaacgagaagctgagggtcaccttcgcattcgagattccggcaggtaccctcaccgatacggaagctggtcggacttttgtttatgagtctccggtcggcattacggatacagatgcgacaaaggataatccaggatatttcagcagtatcaaagcgcattattacttcgaagacaacaaaatctatattgtttttgattcttctgtggtgcaggagaatcaaaaacagcccattacaaacggaacgttcacattcgactccgacgccgcacatgttggtgatggcgatagcggaaagtatgattttggcggtggaaagaagcttgacatcaaagtcaatacaaaaggcgatcttaccgtagccaagtctcattcaacaatttccgatgatggaagtgtcgaatggaccgtcgaggttagcagcaaggcaggcaccaagcccggcgaaaacattgccatcaccgatgttccatctttgggaactattgatagctcttccattacggtgaacggtggtacctgctctcacaccatgactgctgggaatcagggttttaccatgagttgccctgcgctggaagaaaacggcaaatataccatcgtttatacgagcaaggttgatgtagcggatggtgaagtcaccagccagaataattcggtgacggtcaaggctaaagacaagaacgacaacgagcttgagaaaaaggcgtacgattccgtttcttgggataagaaacctacgatcactaagagtgacggtgctctgcaggaagatggcagtgtccagtggacggtcaccgtcgatgcgactaaattgggcgatctcaacggttggactctgaaggatatagtaacgggtggtgcgcttgagggcaatatcacggtttcgcccgcggtgaatggccagacggagttttcgcaattcccgatcacattcggcgaaaacaatgcaagccaagtctatacgtttacttataccaccaaggcatctgacggtgtcatgccaactgagtccaccaataaggccgatctcactccgccgaatggcaaggactcaatctcgaccggtgataagggtgtgaatccggggccatataacccactcgcgaagaccgcgggaacggttaccctttcgaaggatgagaaaacgacggtggtcccttggactgtgaccattgcgccgaaatactctgccgaggccttgccggcaggatggaagtataccgatagactctccgacaatcagtacctcgattcctctcaacgttcggctttggaaacagcgattaaggcttccttccaaaaagctggcctgaatgagccggaggtgacgttccaagagaacaatgggaagaccgtgggtttcaccgtacaatcttcatcacctttgaatgtcgggcaaacgattgagttttcgtataatgcgaccggcaccattacccagacatggaatggtgaacagcagtattcgaattcgggctcgatcggcaaattcaccgtcaacccaagcatcacattttctccgagcaatctgagttggaatctcagcaagattgatgcgaaaactggctcggcatcggattccactcacgaatacaacgattcgtcctcgatggaacaggttgacggcaagccggtcatgcattggcaggtagaagtcaatcaggttgagcatatcgcggatgtgaacagttacgtcgacctgacgattacggaacggttgccttcgggcgtcagcctttcctcgatgagcttcaacatggggggtgaagtgaatctattggttccgtcgtcggatggtactgcagtgacgaccattgccggctggtggaatcttggggataagagcttccaggttacggtcacccgttctggaaacgtgcttacgattgtcgtgcctgctggattgctatccaccgtggcggtgtacggcggcggaaacaatgcaagctggtacaaagccaagttgctgttggatgtccgtgcaacgattgatgacgtttccgcactcggcaagacggcgactgtattcaaaaacacggccagactgagtgactccaccggtaaggactgggacgaaaaaagccagtcgcagaaaatcactagggatgacgagtgggatatcgtcaagaagagctcttcgtatgatcagaacggtcaggattccggtaaacagaatctggtgccatactccattgtggtcaatccgaacgcgatggatttggacaagaattccgatacgctcacgttgaacgacgagttcacttacgattacaaggagtcaaatccggttgagttcaatctcaacgaggtgaaggtgtaccgatacgactcggccagtggtacgaagggcgaggaactggatagcagtgactacacggcgacgccaacttcttccgcaagtggcgataagcgagtcaacggattgacaattacggttcccgattcgacggcattgcttatcgagtattcgtacaaggttgttggacagcagaacgccaccgttcaggtcagcaacaacgtaaccatgaagggtaagacttccggagtatccggtcaatctgtgaaggtcgccgaatcgcatggtgatgcacagataaccaagatgtccttctacaaggcggattccaaagatccttccaatagacttgagggcgcattcttcgacctatacaagtgggacggcacggcctgggttcgtctatgcaagggtttgaggaccgacagcaagggcgcaatcacattttccgctgcaaaggacagcggaaataaggaatgtgaggaaaacccgaatgaggtttgcggtatctcctcggccactatcagactcaacgaggcatacaagctcgttgaaacccaagcccctgaaggctacatcacgccttccggcgatgaggcgattcactacttcatgctcagggacaagaccgccgagtctactttcccgttgacaaagccagatgacttcccgacggatgccatacatatcgggggattcgaaggctacgtcctcaacgataaagaaacggcaaagctcccctcgaccggcggaatgggcgatgcctggttcattggcggtggcgtgctgacggtgttggtggcgagtttcgggctggccgaatccctcaagaacgccaagcgtagcaaggtttcccagaagtgaagcgaccagtaaggctccggaagggcgctccataaccattccgggcctgaaggcatgcggacctttgggcatactccaattcgcacatcacccaagacctgcttggtcaaagggcaaaaccctccaaccaggcaaggccggaaacaaacagattacagacttttgtggctgctgggcaatccagtccagtggccgtaccgaagtgaagaacaatttccaatagataagggattaattatgaagagggcaatcaacgctctggttgcggtgctcgccaccgttgccatggcagtcgctggtttcatgggcgcgggcactgcgttcgcggatgaggccaataccatcaccggtccgaagaatggccatacctatgaggcctatcagatcttcactggtgatctggctgatggcaagctgtccaacgtcaagtggggctccgctactgcaaagaacggtaccgctgtcaccgatgcggaattgaagacggtcaccgatctggcttccaagtccgtgaatgacaatgcgcaggcgaccgcgaacgccatcgccgcgtatctcacgtccgatgcccagccgaccgcgaccatcgatgacaccaaccccaccgctcaggtgccgtctggctactacctgatcaaggacaagaacaacacggttcctgacggacaggccgccaccacctacatcgtgaccgtggccggtaatgtgaccatcaccccgaagtccgacgttccgtccttcgagaagaagctgaaggataccaacgacaccaccggtgagacttccgactggcaggattctgccgactacgacatcaacgatgccgtcccgttcaagctcgaaggcaccgtggcttccaactacgccgactatgacacttactacttcgccttccatgatgtcgaagagaacagcctgaccttcaacaaggactccgtcaaggtctatgtcgacgacactgagatcaccagcggctattcggttgtgaccgagggcctgaccgacggttgcaccttcgaggtgaagttcgctaacctgaagaccatcgatggcgttaaggccggttccaagatccgcgtcgagtacacctccacgttgaacgagaacgccgtccttggtaagcatggcaacgtgaacaaggccaagctgcagtattccaacaacccgaacgatgagcagggcggcgagaccagcccgaccggcgagaccccgtgggacaacgtcatcgtgttcacctacaagaccgtcatcaacaaggtcgacgacaagaaccagccgctgaagggcgccgagttcaccctgagcaagaagatgaagaatggatccaccacgaccgtggccgtcgtgaaggacagcgaaggcaccaccttcaccttcaacggcctggatgacggcgactacgtcctgaccgaaaccaagaccccggccggctacaacaagatcgacgacatcaccttcaccgtgaccgccaaccatacgatcacctgggaaggcgaagatcgtgacacgatcctgaccagcctgagcggtaacgccgcttctggtgagatcaccttcacgcctacggatgacaagtccgagctggacaccagcgtggtcaacaagccgggttcctccctgccggagaccggtggcatgggcaccatcgtgctgtacgctgccggtgccgtcctggtgattgtggccggcgtgtacttcggtctcaagaagaagaacgctcgctgagcgaactggtgtgatgtgattcatggagcggtccgaatcgttcgggccgctccatggtcaccgacacggcgaggaacgtatgagtcggcacagggtacggaaagccaaggcgagcctgggatcgcggatcatgtccgcgttcttcgcgttcgtgctcgtggcggggttggtcctgctggcgtatccgagtgtcgcgaactggtggaaccagttgcaccagtcacgggccgtggcgacctacatcgcgcagagcaaggattattccaaacagcagcgcaaggtcatgatcgccatggcacgccaatataatgcgcagctttcgcagcgggcgttgctaagcaagagcgagaacgagaacgaccgttgggtcatgaccgatgccgagaaacggtattacgagagcgtgctcgacatcaccggcacgggcgtgatgggctacgtgaccatccccagcatcaaggtgcgcctgccgatctaccacggcaccgacgagggcatcctgcagatcgcgaccggccatatcgcgggcagttcgctgccggtgggcggcgagtccacgcatgcggtggtgtccgggcataccggactgcccagcgccaagcttttcaccggcctggacaagctgaagaagggcgacacgttcgccttccacgtgctcgagcggacctacacgtaccgggtggaccagatcagcgtggtcctgccgaaagacctttcaaaactgaacatcgagtcgggtatggattacgcgaccctggtgacctgcacgccgtacggcgtgaacacgcaccgtctgctggtgcgcgggcaccgcatcgcgaacccggatgccgccgacacgaccgactatgacgcgcgcatccggctgatgagcgcgatcatcatcaccacgacgctgctcgtgctcacggccatcttctcgtggctggcctggacgacgagacgctacctcgcgcagaagagggcgatgcggccgatgccgttatcgggggagccatgggacgacgtggccggcatcgcggacccgttgaacgacaaccaacgccgacatgcaaaggaatggcgaaaatgaacaatcacgataacggccgtgttcgcggcctctttcacgcagtcgcgatgattgtggcgttcgtgtgcgccgcggcctgcgcccttgcggtcgcgctgggtgcgggcgtcgccgtggcgcatgcggacgagacggggcgggccggcgggaccggcaccatcgaactgaagtacgaataccagggcgagtcgctcgagggcgacggggtgagcctgtaccgcgtggccgattgggacggcggcgcgttcacgctgcgcgacgagtacgccgacgccgacttcggcaccgacgcgcgcggctgggacggtctcatggacgacctgaaggatggcaaggccagtgccgaacagttccaggcggccgccaacacgttggacgcgtacgtgcgcgccgagggcatcgaagcgacgcggaccggcaccatctacgggctgggcgcctccttctccggcgtggacaagggcctgtacctggtggtctacgaccgtttcgaggacgccgtgaagacgtgcggctcctccgcgagcctggtgtccgtgccgtccaacgagaacggcaggctcgtgtcggacgtgaaggcgtattccaagagttcgtgcgaggcgactccggagagcccggagaccacgcgggtggacgtcaccaaggtatggaagggcgacacgcggcaggcgcgtcccgggtccatccaggtgcagctgatccgtgacggcgaggtgtacgacaccgcgacattggccgccgggaacaattggaagcattcgtggagcggcctggatgcctcgcatgactggctcgtcagggagaagaacgtgccggagggttacgtggtggccgtcgagcgtgactcgaccgatgtcacgatcacgaacaccgcgaccaggcaggcgagtaccggctcgaacgtgatggtcgtggccgggctcatggtcgctgtggcgtcggtggcgctggtgacgctcgccatagtccgcacacgccgcaaccgcaactgatccgaatgcgcaactgatccgaatatacgaaaaactggtctgtttccagcgtaattggctggaaacagaccagtttttcgtatatataaaccagtatccgaggtacatgcggttggtgaccgcagcgcgtgaggtgactgctcgacgtgtgaaggatgatgcggacgggtgtattacagggggaacatagcgggtgtgttcctcgtttgaaaaacgcttgcatctcaggtgaatttggggtactttacaaaatcttcacaagcagattccccgaaatcgggggggggggggtgctgttttttgggtatcgcacccccgtttcccctatttcaggggttttcttgaatacgaaagggtggaatggatgataacgaagggtgttatcgggggataatggccgttcaaaaccaccggtgaggtacggttttgatacgcttcgtggcgtagaaataaccctaggcagttttcaagggggttattatggcaggcagtcaagggctgttcacgctcaaagaggccgcttacctgcggtctcttccggctgtgaaagaggtgagtgccactcgcatcacctattccgaccgattcaaggtcgaatgcgtacgccgttacctcaagggggaatcggcccgcaagatcttccgcgatgcggggctcgatccgtcccttatcggggcgaagcgcatcgaacgttgcatcgcacgctggaagaccaccaaatccattgtcgatgaagccgcaaggatcgatgccaacgccagtggcgaagacggcgtcgataccgccgcctccgggcaggtggggtgcatcgatgcgaaatccgtgcttgatagctacgacatcgccaacgcggcgttcgcagcgatcagcaccagcaaatccggtcgcgaaatgttcgacgtgcgcgacttgatcatctaccagcaggtgcagcaaatcaccgccctgcaagagaaggtggccgagttgcagcgtcgcatcgaacatttgaccgatgtcgccgctgccaggaatgtcgcgaccgaaaccgcggcggcgaccgactgaggggactgacaagaccaggttggtagatgtgcgaactgcggacatgaggcgagcctgtagccaaccaatccaaaagacgacgggtagtagcggtaagtgaagcggccgctacgcccgtcgtcttttgtttgacctgtgcggggtggtcgggcatctccacctacaatggtgggtatggcatctaaaggaaaaccctcaccgaggtcggcggtaaagcccttaagcgacgcgcaggtggcgaaactggcggcggcacatcatctggtcgatcccacccgtgactttccgaccggaccgcgaacggccaatacggcggaaatcgaagcgcagaatcccaaggctacgcaccggctgctgaccggctgcgacgtggtgctccgcaaccgcagcaaggtgcgcgcgtgggggcttgagcatgtgccggaaaccggtccgttcatcaccgcggcgacgcatgtgaccatgtacgacgtgttcgtgccgatggtcggcctgttccatcagggacgccgcccccgttacatggcgaaagccgaaatggcgacctggccgctgatcggcaaatggttccagctggtcggcatgcagcccgtgcagagacgttcaggtaaggcaaaggccatcgaagagacgtcgatcgaaattctggcctccggacgaccgctgaccgtgtggccggaaggcaccgtgacgcgcgacccccagaagtggccgatgagcatgaagaacggcgtgggcgtgatagcgctggaatcctcacgcagacttggctaccaagtaccgctgttctgctccgtgacgtggggtgcggcaagcatcaaccacttctggccgtggccgcgcaagaacgtggtgatgtgctacgacgcggcgttggattatgcggatctgctggagggctcttccgagtggggcgagagcgtgccggaacacctggccgatgagctgacccgccgcatccgcgtgcgcatgaccgaaatcatggccgaaatccgcggcgagcaagcacctgacggctattgggactaccgcaccatgaggcgcgtgagggagtaagcggggctcacctttgccggcgcaaacggcggattccataccgagtcggctgtagcataggggaagcaacgttgaaggcggtaatccgcgggagcgatccaaggagcgaaacaatgacgaacgtgacggtactgggcgcaggtgcttggggaacgaccttcggccaggtgctggccgacgcgggcaacaacgtgaccatgtgggccatcgagccggaaatcgtggaaggcatccgcgaccaccatcacaacggcgtgcgcctgcccagcgtggcggtgctgccgagcaacatgaccgcgaccggcgaccgggccgaggccgtgcgtgacgccgacatcatcatcgtggccatcgcggcgcagttcgcgcgcgtggccttgcaggaattcaaggacctcattcccaagacggcgctcgtggcatcgctgatgaagggcatcgaacgttccacgggcaagcgtatggacgaagtcgtcaccgaaaccctggatttgccggcggaacgtttcgcggccatctccggaccgaacctgagcaagcagatcgccgaccgcgaaccggccgccaccgtagtgggctgcaccgacctcgacaacgcccgcaccatcgccgccgcctgctccaccgactatttccgcgccttcgtgacgcgcgacgtgatcggcctggaaatgtgcggatcgctcaagaacgtggtggcactcgccgtgggcatggcccgcggtgccggctacggcgagaacaccgcggccatgatcgagacccgaggcctcgccgaactgaccgcactgggtgcggcggccggcgccgatccgaagaccttcgccggactcgccggcgtgggcgatatgatcgccacctgcggttccccactgagccgcaactacacgttcggctccaatctgggcaagggcctgagcgttgaagaagccaccaaggtcagcaacggtgtggccgaaggcgtgccgaccaccgatgcggtcgtggccttgggcaagcaatacggcgtggccaccccgctcgccaccgccatgagccacgtgctctccgacggcatctcctgcgcccagatgctctccgaactcttcgatgaagacatcagcgaagagtaagaagacggagtaagcggcgaatagtatgctggtgtggtaaacgcaaaggctagtcaaagggcggaacatggctaagaagcgcattgtggtgatgtatggcggcaaggccgatgagcattcgatttcgtgcatctccaccgcaggagtgctgcgtgcgctggatgtggagaagttcgaggcgattccggtcggcatcaccaaaaccggccagtggatcgtcgacggtgaggatccgcgcggctggaacatgagcgaaggcatgccaatcgtcaggaaaaccgataccgccaaggacgtggtgcttgacgtggctctcggccaagacggtttcttcgcgcgtgaggccgacggtacgctgacctcccttggccatgtggacgcggtgttgccggtgctgcacggtccgtatggcgaggacggcaccatccagggtctgttcgaaatgatgaacgtgccatacgtgggttgcggtgtgttcgcctccgccgcttgcatggacaagcactatacgaaggtgctgctggctgccgccggcattccggtcgcccccggcattacgttggatgcacgcgattacgatgccgcttgcgcatttgccgcaaacggcgaaacgatgttggccgcggtacaggctgcgggattgcggtatccgctgttcgtcaagccgtcccgtgccggttccagcttcggcgtgaccaaggtggaacgcgagggtgacgccgccgaactggccgccgccgtattcgaagcgtcccaccatgattggcgtgtgctggtcgagcaaggcatcgacgctcgtgagatcgaatgtgcggtgctgtgcccgaaagccggcgacgaaccgcgtgccagctggccgggtgagattgtgcttgacaagcgtgccggtggcgacgatcagttctacgatttcgacagcaaatacatggacgccgaggcgagccatgtggaagtgcctgcggccctgcctcaggagacgctcgaactggtgcgtgaaaccgcgaagaaggcgttcaaagcggtcgatggcacaggcctaagccgtgtggacacgttcgtgacggccgatggcaaggtgatggtcaacgaaatcaacaccatgccgggcttcacgccgatttccatgtatcccaaggcgtgggacgccacaggcgtaagctataccgatctgatctccaccctcatcgaaggcgtgctggagtagtcgaccggcgaagtcggcacgacaggtttaccggaaatttgccgaagtgacatggaaatattcctaaatattgcttcggcttcactgtaacgacagcccggcgttaatcatcatcgttaagttccttgttgtcagtacgaagaaagacaacaaggaaagacatgatttctctgcgtaagttcgccgccggctcgatcgccgccgtgctcgcattctccatggccgcctgcggctcgagcagcaacagttcctctgaaaccagcggcaaggccgtgagcgtggacgagaagtccgcctccgccacctcacttgaagacttcggcaccatggacgatctcgtggccgccgccgaaaaggaaggcgcgctcaacgtcatcgccctgcctcacaactggtccaactatggtgaggtcatcaacggtttcaagaagaagtatccgaagatcaaggtcaacgaacagaacccgaacgcatcctccaaggaggaagtggacgccggcaagaccaacaagggcaccgacgccgccccggacgtgtatgatctcggcttggcggtggcctccaccagcaccgacaacttcgcctcctacaaggtgcaggcctgggacaagattccggactccgccaaggataaggacggcaagtactacgccgactacaccggcatcatgtcgatcggctggaatgccgacaagtacggtgacatcaactccatcgacgatctgaccgatgcgaaattcgccggaaccgtggccctgaatggcaagcccgccgaagccggcgccgcattcaacggctacctgatgatcaaccagcttgccggcggcgacatcgacaacctgcagccgggccttgacttcttcaagaaactcaaggattgcggcaaccttaccaccgtcgacgtgaccgatggcaccatcgactccggccagaccggcgtggtgatggactggacctacaatcaggcctcctatcagaagagcctgaaggaaaagggcgtgaactggaagtacaagaccttcaagaacgcgcaggtggtcagctactacaaccaggccatcaacgtggacgccccgcatccggccgcagcccgcctgtgggaggaatatctgtacagcgccgacgcccagaacgaatggttcaagggcggtgccaacccggttctgctcgactccatgaaggaagatggcaccgtcgaccaggacaccttgaagtccgccatcaccatcgaaggcgatccggtgagctacaccaacgaagactccacccgcatcaccgagtggctgcagaacaattgggacaagaccatcggtaactgacatgaccgcagctctcacctcaggagctcgcgccaaccgcgcgggctcctccgccatctcgctttccgcgcacaagcgtgaactcggcaccttcgccgtatccatcccgttcttcgcctacaccgcatgcttcctgctcgcaccgaccgccatcgtggtgatcggcgccttccaggcggccgacggcggtttcaccatagccaacttcgccaaactgttcgaagcgaacaccatcgcggcgttcgctacgtcgattctcgtatcgctggcatccgccgtgatcggtgcgatcgtgggtgcgcttgccagctatgccttggtgattggctccaaacccaacggtctgcttcgccgtatgatctccgccatctcctccgtgctcgcccagtttggcggtgtgatgcttgctttcgcgttcatcgccaccatcggcatcaacggcatgggcactgtgctgatcaagcaactgaccggacttaccgtgaacccgaactggctgagttcactgccgggtctgatcaccatctactgctacttccagattccgctgatgatcatcatcttcctgcctgcggtcgattcgattcgcccgcagtggcgtgaagccaccgaaagcctcggcggcaacaccttccaatactggacccgtgtagccgggccgattctcgcgccccgtttcatctccgcgttcctgctgctgttcgccagtgcgttctccgcctacgccaccgcggccgcgctgttctcacagcgctcgattcttgtgccgctgatgattcagggcgcgatgcgcaacgaaatggatccgaatcagcaggggttcgcgcaagtgctcgccttcgccatgatcgtggtcgtagcggtggtcatgctgatgagtcacgccgtggaaaagagggccggacaatggcagtgaacgcgacaccgatgacgacgcaatcgcagaaaaccgcatcaccgcaggcaaagcagatgccgccgcagctacgtgcggcccgtgtggccaagcaacgcatcatcaaaaccgtgattcttggcgtgacgctgctgttcctgttcgtgccgctcgtatccatgtttctgttcaccattcggcatccgttgtcgggcaagtggagtcttgacccgtggattgccatcttcaccggcgacggcagtgcgctcggtgcggatctgaccacgttgtggagtggcctcggcacttcgctcgcactgtgcgtggtgaccgtggcgatcatgctggcgttgctcgtgccgaccatggtgatcgtccacatccgttctcgacggctcgaacgcatcatcgagtgggtggccacgctgccgctgaccatcccggccatcgtgctcgtggttggtcttgggccaatctaccgatggctgtcggccgacgtactcagcaccaatccgatctggctgtgcttcgcctacgtggtgctggtcatgccgttcgccttccgcgcgcttgcggtgggactgaactccatcgatgtgaagacgctatgcgaggcttcgcgctcgctcggctcatcatggccacgcgtattcttccgcgtgctcattccgaacctgtggcagtcgatcctgtccgcatcgttcatttccatcgccgtggtactgggcgaatacaccgtcgcctcactgctcggccgtatgaatctgcaggtcgcgctttatcagcttggccaatccaactcccaaatctccaccgcaatgtcactgttggcactgttgttcggcgtgatcctgctggtggccctcgatctgatttccgacgcgatacgtcgatccaaggaaggtgacaagtaatgtctcttgccgaacagaaagcggtggtggcacataccgcagaagcgttcaccgatgtcgaacccgacgccaacatggtgaccgaagccgccaaggccgtgctcaaggattccgaggcgcgcggtggcggcgtgcagatgctgggcgtcgataagatctaccccggttcgaacgtgaaggcacttaatgatttcaacttggaaatcaagccgggagagatggtcgtactgctcggcggctccggttgcggcaagtccactgcattgcgctcgcttgccgggttggaggacattcaggccggccgtattctcgtcggcggccaggatgtgaccggtgtgcccgtcaacaagcgtgacatggccatggtgttccaagcgtattcgctgtttccgcatatgacagccctgcagaacgtggaattcgggctggaaattcgaggcgtgacccgtgcggagcgtcgtcaccttgccatggagaaacttgatctggtcggtctcgcggaccaggccggaaagtatacgcagcagatgtcgggaggtcagcagcaacgcgtcgcgttggcgcgtgcgttggccgtgaacccgcgtgtgctgctgcttgacgaaccgctatccgcgttggatgccaaggtgcgcgtgcagttgcgcgacgagatccgtcgcatccagctcgaggcgggcaccaccaccgtattcgtgacgcacgatcaggaagaagcgcttgcggtggccgaccggatcggcgtgatgaaccacggacgcatcgagcagatcgccgatccgcagacgctgtaccgtcgtccggaaaccgagtatgtggcgacattcatcggcttgacgaaccgactgccgggcatctccaacggtgcggaggcagtggtgttcggacaacgtgtgccgctgctggaaggttcccgcaaggaaggcgccgtggtattggtacgtccggaaaacatgacgattgcgatgcatgaggccggcgttgccggatcaggttccggcgccggtgaagtgggacgcgtggagatggtgcacttcctgggggcgctggcccgtgtggacgtgtgcatcatggcagcggaataccgcggactcggtggcgaggatggtgcggcattgcgcgtgaccgtgcaggtgccggccaacgagctgccgtccggtctgaccgttggctccgaagtgatggtcgctccgcggcccattgccgcgctcgccgtgtaaaaatgacgggattggcgtcgatgctcagacttttgtactaaagtcctgagcatcgacgcattttgtttctcgtgaagccgaggatgaccatgacttttccgcaacagccgcaatacccaccgcagtatccgcagtacccaccgcaatatccacagccacggtcgcaatatcctcaacagatgccgcctcagcagccgtacccgcaaccggcattgccttatgatttccatgcatggctgaaagacgccaaacgcaacttttcacggatcggctggggcatgtgcgcaatggtcgtcgcgtgggaagggctcgcggtcatcgtttcggcgctgttgcgctccaccgtactgcagcatgccagcagcatgccgaactgggccatctatctgtgttccagcatgcctctatactgcgttgccatgccgctggcctggctgctcatgcgcactgtgccggcgttgccgacacgtgaattcagacttgggccgaagcgtttcttcatgttgttcgtcatgatactgccgctcgtctatgtggccaatatcgtcagcgtcatacttgcgatgctcctgtcaggaggaagggcgaacaacaaccttgcggacgtcgtctcgcagatcgacatctggaatgtggtgttcctggtaatctgcgcaccgatttttgaggaatggatgttccgcaaacagctcatcagcagactgcgcagatacggtgagaagaccgcgatcctgttctcggcattggcgttcgcactgttccatatgaacctgtaccaggcgctgtatgcgttcatgcttggcctgatgttcggctatgtgtacacgcgcacgagccggttgcgctacagcgtggccatgcacatgctgttcaatttcaacgggggcgtgatcgcgccgtgggtggcttcgcgcatggacgcgaaaacgttgagcatgatgtcttcgaatggcgccggtgccggcacgcaggtggccggtgtggtgcttatcgtgatgctgtacggcctgtgcatgctgggactgatcattgcgggcgtcatactgctggtacgtgaagccaagcatctggaattctataccgcgccggaagaactgccgcgtggtacccgggtcggcacggcgctgggcaattcaggcatggtggcgttcatcatactgacggtggcgttgaccgcattgacgctcatcgcctccatggtatgaatggacgattggaaggtatgcgcctgagctagaggagcgttactgctcgtctgtggcgatggcgccatgctccaaatactcggcgttggcgatggcgcgagctacggcgtcggccatggtcgaaagcagcagatcgctttttgcgaaggcatagaccatgccttcgatgccatacggcgagaatccggtgagctttacctttgtggggtattgcgtattcgcgaggcccttcgtctccttctcgacggcggcgatgatgtcttgttccatctgatcgggatcgatgccggccttcgcggtgaacggcacctgcaccaggcattcgttgatcggatcgagcttttcgagcgaagcggtgttcagaatcgaattcgggatcaccatttcattgccgttgcgttccctgacgatggtctgacgccagttgatgtctttgacgacgcctttcgtgccggaaacgcttacgtagtcgccgggctggatcacatggccgagcatcaggccgaagccgccgatcacgttggcgatcgtgtctttcaagccaagggagacggcgagaccgccgatgccgagggcggtgaacagggtggtcggattcacgccgaataccggctgcagcacggtcgccaccgccagcacccatacgaccacgcgcaggatattcacgaagatcgaggcgttcggcacctgcgaacggtcgagaatcttgcgtaccacgcgcgtaagcgccttgtcgatgatgatggcgatcagcacgacgatggcaaggaatacgagcttcccatagttggactgtagccatttccatatgatttcaagcggatccatgtggcttagtctaacgcacgccgcatgggcgttgacggactagagttgtggtatgggcaatgtcgtggattatgtgcgttcggaattccgcacattcggtgagctggaattcagcaatgtcgattcgctggtgctttccgaactgtcatacatgtgtctttccggactggtgcctgcgttcgaggcggccaaatcagtggcgaccgtgccgattgcgcggttgctgcgcgccgaggactatccggccatgttcgcttcgaattccggcgatatgaacgattatcggcttgcattgctgcgtgccgtatgcgaatcgccacgattccgcggactgcgcgtcggcgagtatgccgagcgtcttgatacgtgcagggaacagcagttcgccgcgatgacattcgatctgggtgattgcccgcatgccgtggcttcgccggactccgatgattcggccgattcgtcggccggcgcggcgggattgctgtatgtcgcctttcgtggcacggacggtacgctcgtcggatggaaggaggatttcaacatggcggtgcgttgcccggtgccgtcacaggaatccgcataccgatatgtggattcgatcatggagcgttccgcaggattcctatccgtctcttcggcacctgacatcatgatcggcgggcattccaagggtggcaatatggccgcatatgcggccatgctggtcgcgcagcatgatatcgaggaatcctgcgaacaggcaaggaatctgggattgatgccggcgttgggcggtacggtggcaggccgtaacggcagaatcccaagaatctattcgcatgacggtcccgggttgccgcaggccgtggtggatggtcaggcctaccgtgccatcagcgggcgaatcgacaagacggtaccggaatcgtcgattgtgggcatgctgctgcaaacgtccgcacactataccgtggtcaaggccgacgccatcggcatcatgcagcatctcggcgcgagctggcaggtggccgacggtgcgttcgaacgggcgagcggactgtcgggcggcgcgcaggtcgtgaagaagaccatcgacacgtggctggacacggtagggcgggaacggcgcgggcgggcaatcgaccaactatacgaaatcttcgcggcggcggggtatgcgaatatcgccgatctgaccgcgaactggacggattcgctgcctaagattctcgccgcggccaaaggcacggaccgagagacccgcgcgctcatccgcgacgtgctcaaagccgttcccgccagtgcggccaaagccctcgatccgcgctagcgtgtgcgggaatcgtggcgggacatggattcgcgcacacgttgcatgatgcgggagtcccgtacggatgtcatggtcgggaacgcctgaatcagacgctgctgctgccagctcagcaccttgcgtgcgcgagcctcggtggcggcgaatttctcgtcgaagcgctcgcggccgcgggcctcatattgcgcaagttcgcgttgcagctgggtgatgcggttgtcgaaactcaacaggccggacagcgtaagtgagatgtcggtgacgagtatgagcgtgaagatgatcgtcagaatatccaaggtaagcggctgccaggaatcaagtacgtcggaaacccacggctgcacgtattccttgactacggccgcgccgatgccgaaagccaggaatccgttcagatagatgcgtccgttgatattgaacggtttgccggtgtaatcccacagtcttatgtggaacagcttttcgatggcccacgatgagaaatattccagcgtgcaggccagcatgccggaactgaggaacaatgcgatcggattgtcgacatcatgcagcagaacgatcaccgaggccgccccgaagccgtatatcgggcagagcgggccgttcagaatgccacgatcaacccattttttgcgtaagaccagattcaagccggtttcccatacccaaccgaccacgctgtagaacagccaccacaggaaaatcttttcaatcgcgaatcgcatattcgcaggttatacccttcgcgatggttcggtcgaatggggcgattgtctcgccgaaagatgaaaaccctgcagtgagcgagtgtcggttcggttctacgcggaagattgctgggaaaacgctgaatatcgggtggtggaggggaaaatcgacgcataatgaaaggagtgcgatcaccgggacggtcatcgcaaaagactccatcgataagggcctctatcgcggaccggcctgatttggcaacgtctcaaacgtcggaaaggagcgggagatgggcaacatcatcgactatgcgcgtaccgaaacgcgtagtttcgaaacattgccgttccgtgcggccgacgcgctcgtgctggcgcagctctcgtatgacgacgtacccgaatgcgtgccgacgcttgacgaactgtatgcgaggtacagtacgttcgcccgccgagtgcagtcgttctcgttccgcaggcctatcgcatcgctcagaacgttgcggttcgcgccttttcacggagtgaccatcgcgcatgccgacgacgagttgcatcatgaccgtgccgtgccggaccatgatgtcgagagcgtgggactgatcgatcctcagatcacgcatgacttctaccgtgcggtggcggccaatccacgtttcgcggacgtggagatgagcgcgttctgcgaacagttcgacggcgatgaacagacgcagttcgcggcggtgacctaccggctgccgaacaatacgttggtcgtgacgtttcgcggtaccgatgattcgctggtcggctggaaagaggacttcaacatggccttccggtatccggtgccggcgcaggtctccgcggcggactatctgggcaaggtggcgcagctatggcgagggccgatcatcctgacgggccattccaagggcggcaaccttgccgtgtacgccgccatgaatgcggaagacaaggtgaaggaccgcattgagcacatctactcgcttgacgggcccggcttccccgaggcggtggtgcgcagtttcgagtatgcgagcgtgcatgagcggatcaccaagatcgtgccggattcctcggtggtgggcatggtgcttgaaacgccggagcgttgcatggtggtgaagtccgatgtggacggcatcatgcagcatttcgcgttctcgtggcagatgcatggcggcgaattcgccaaggtcgaggatgtggcgaacagttccgtgacgttcaacaagtcgttgaacggctggctttcggggctttccgaagagcaacgggagcatgccgtggacgcgttgttctcggtattggcggcctccggggccgataacatctccggtatggtggcggccgggccgaaggtgattcccgatatgctcggaacatatgtgggactcagcggcgaggatcggcgcaatatcaatcaggcgctgatgattctgctgcaggccgcgctgtcgcgcaatcccaaggtacaacgcaagtagcggcgcgcttgctgcaggggaggaatgcgggaaatacgacacgcatcggaggagtgttgtagacagtctgtacaataaagtgagggtataggcaacgtgactaattagctaggtttagggggcattatgccgcgtccacgtcgagattctgaaatactgccggccaaggaacgtctcgaaaacgcgttttgggaactgttggccgaacgcaactatcataagatcaccgtcaccgacatcgtgcgcgttgcggacgtgaatcgcaattccttctactatcatttctccggactgccggaactggccgattccgccatcctgcatgcagtggaaaacacgccgatcccaagccgcccgggtgcgaacttcaatcctgacgatgaatggcgcaagcacatcaccgcattgctgcgcgatcccgaccaacgtcagcgtctggaccgtctggccctgctcgccggcccgcacagttcgccggaactcatcgaatcgctacgtgatttcggacgcctgaccatgatcagcgtgctcggactcgacgccgagcatctggacctcaaaaccgatctgatgctcgacttcaccgtgggtggcatgcttgcggtgctgcagcgctggccgaaactgcatgagcaactgccgatcgacaccgtattcaacgaggatctcgccgtactcgcggcaggcatgttcatgtcgatgtcccgctcgaacatgctcgactattggcgcaggatcttcagcaacggattcgtgcccggtgcgaatccccggcagtgattctgccagatgacaccgtgacggcccgtcgtgacttttcggtggtagaaacgaagaagacgtttacgtccgtttacgcgaaagctcgacagggaggttgcccatgatcaatgaagcctacaaggccatgcttggcggaaaatccgtgatccgtgaactcagcgagtatgcgacggcacgcggggccgaaatcggctacgagaacgtgttcgactactcgttgggcaacccgagcgtaccgtgtccgcagagcttcaccgatgtgatggccgacatgtatgccaccgccgagccggtggcgctgcacggctattcgccgtcgttgggcattccgtcggtgcgtacggcgatcgccgaaagcctgaaccgtcgcttcgggatggactatacggccgaccacatcttcccgaccacgggtgcggcgggcgcgctggcgcatgcgctgcgtgtggtgaccaagccgggcgatgaggtgatcaccttcgctccgtatttcccggaataccagccgtatgtggatggtaccggcgcgcgtctgaccgtggtgccggccgatacgcagaacttccagatcaatttcgaggcgttcgaggacgcgatgaacccgggtgtggccgcggtgctcatcaatacgccgaacaatccgtccggtgccgtgtattccgccgagacgttgacgcgactggctgaattcctgcgcgcgaagcaggttgagtacggtcacgacatcttcctgatctccgacgagccgtatcgcgaaatcgtattcgacggcggcgcccagccgtacccgagcacgttctacgacaatacgctctcgtgctactcgtactccaagtcgctgagcctgccgggcgagcgcatcggctatgtggcggtgaatccacgtgccaccgatgccgagctgatcgtgccgatgtgcggccagatcagccgcggaaccgggcataactgcccgagttccagcatccagctgggcgtggccaaggtggtcgacgagaccagcgatctttccgtgtatgaaacgaacatgaacctgctgtacgacgcgctcacccgcctcggattcgaagtggtgcgccccggcggcacgttctacatcttcccgaaggcgttggaggacgacgccaacgccttctgcatgaaggccaaggattacgacctgattctcgtgccgtccgacagcttcggcgtgccgggctacttccgtatggcctactgcatcgatacggaaaaggtggagcgttccatcgccgcactggaaaggttcgtgcacgaggtgtacgggcgttgacgggcgagtgctccctctgatgagggagcactcatgtaccgttgatcgtacgccgttcagtgagtggcgatttcgtcgatcttggtgacatggccgccgaactgggcgcgcatggtggacaccacgcgcagaatgtcgtccgcgccgcctcgtgaggtctggcgggaatacagtgcggccgcggtcgccggcgtaggcacgcccagctcgagcgccgcctcgatcatccacttcgcttcgccggattcattggcgacgggcggcatggaggcaagcgtcgggtcggtcctgaaggcgatcgccagcagatccagcagccacgactgcaccaccgatccatcacgccaggaagacattacggctgcagggtcttcgaccagctcggacttcaccatggtggcgaaaccctctccgaatgcctgcatcatgccgtattcgatgccattgtgcaccattttggcgaaatgaccgccgccgaccggtccggccagcaccagaccggagtcgcccttcggcttcaatgcctcgaaaatcgggcgggccgattcgaaattctccttgctgccgcccaccatcagcgcatatccgcggtcgatgccccacacgccgccggaaacgccgcagtccatgaaccgaatgcccttgccgtcgagctgtgccgcatgacgggtgtcgtcggtataacgtgagttgccgccgtcgatgatcatgtcgccgggctcaagcagctcggccagttcgttgacggtaccgtcggtcgcttcgccggccggcaccatgatccatacgatgcggggagcgtcgagcgcggcgaccagcgcttccaagctgtcgacggtgcggtccgattcgggcgaacggtcgtagccgacgacgtcgatgcctgccgcggcgatgcgcttcgccatattgccacccattcggccgaggccaatcattccgagctgcatgatgatcttctttctactgttgggataggggttggggattgcatatggatccgattggtgattgttgggaaaggttgccgcccgttccgtcttccccggccttccgcaacgcaggaaagaaggttgcggaagacgggacggacggcaagtattgtcacaggaccagcgagagcagcatcactccgccaaggccgacgaccgagagtacggtctccatcagcgaccaggtcttcagcgtctggccgacggtcatgccgaagtattccttgaccagccagaagccggcgtcgttgaggtgcgagaagaatacggatccggcaccgatggcgagtacgagcagtgcgagatgcgtcgggctcatgccggttgcgagcggcaccatgatgccggatgcggtgacggtggcgacggtcgcggaaccggtggcgagacgaatgagcacggctaccagccagcctgcgatcagcgggttcatggcggattcggtgattgagctggcaatcacatcgccgatgccggaatcgaccaaggtctgcttgaaaccgccgccggcggcgacgatcagtatgatgccggccaccgaaccgaacgactggccgaccatgccgttgaccgcgtcgcgggtgaacttctgcaggtaaccgagcacgaccatcgcgaagatcgtggtgagcagcagtgcgacgagcggggtgccgaggaatgccagcacgcggccccatacggtttcgctctgaccggtcagatcaaccacgctggcggcgagcatgagcacgaccggtaacatgatcacggtgatggccgaagcgaatgacgggcggttctctgcggatttcggggcttcggcttcggccttgttctcgggggcggagatcggcacccacttggcggcgagcttgccgaacagcgggccggagatgatcacggtcggaatggctacgagcaggccaagcgccaacgtgatgccgagattcgcgttcagtgcgccgatggcggtgagcggtccggggtgcggcggcacgaaggcatgcagggtggataggccggcaagggccggaatgcccagcaggatgaccggggtcttggcgcggcgggcggcgaagagcaccaccgggatgagaatgaccacgccgacttcgaagaacatcgggatgccgacgatgaatgcgatcaaggccatggcccaaggcaggcgttgcagcggcgtcttatccatgatggtgtcgacgatggtgtccgcaccgccggacttgaacaggatcgtgccgatgatcgagccgaacgcgatgagcaggcccacattggagatcgtcgatccgacgccggatgtgaagctgtcgaatgccttgtcgtattccactcccgcgcatacggccatggcgaacgagccggccaggagcgaaaggaacggatgcaccttgcataccgcgatcagtatgacgatgatggcgatgccgatgatcgccgcggctataagattcatgaatcctccttgattcacgtgctgcgttgcttggaaaagacgggattgccgtgggattgcggtctaggcggcctgctgccgggattgcggggcgacggatcgcgcatactcgtttacagcgtcaagcgcacgttccaccatggcgtccacactgccttcgatggaaacctccacgccgttctcgtcgggggagagcggctcgaggatggcgaactggctcggcagaagcgccggtggcatgaaatgccccttgcgctcgttcaggcgctgctggatgagttcctgcgtgccgctgaggtgaatgaagaaggtcggtacgttctcggacagtgcttcgcggtagctgcgcttcagtgcggagctggagaccacggtgttctcgccgagtgcctcgcgtgccaccatccatttattgatgacccgcagccagggccagcggtcctcgtcggtcaggggaatgccggcggacatcttatcgatattggcctgcgggtggaagtcgtcgccttcggcgtacgcatagccgagtcgttcgtgaattgcctccgcaacggtggatttgccgcagccagcaacgcccatcaccactacgtgaatgctcattgtcgctctccttcaagtgtgtgcctgccgttgccacttcgcatcgacattgagactactataaatcttaaaggtagtatctgtcaaatcaaaagtactacgaaacggaaaaatcgtgtgacttggtatgattcgggtagtacaaatggcggaaatcaatggtggaaacacatggtggacaccatgggaaagagggcatgcggacaatccgcgcaacatgcggtcttcgtcatgatgcagacgtcacggcgtgccgcacacatgcggaacaagtcggaagcgtaaggagagggacatggcagcaatcgccgaaaacgcaggcggcgaactgatgcaggattcggtaagccaaacactggccatcgaaatgctcgacggcatatggcaggtcggcgacagcctgacgctggaagacatgcaaagccgtttcggcatctcccgaaccgtggcgcgcgaagtcgcgaaaacactcgaatccctaagcgcagtatgggtacgcagacgcgtcggacttgtggcgcggccgttcagcgagtggcaggcgctcaaccgtcaggtcatcgaatggagactgcactccacgcaacgcgaacaacagctctattcactcaccgaactgcgactggccgtggaaccggccgccgccgcctcggcggcccgactcgcacccatcgacgtcaaggcaaaattccccgtctatgcggcacagatgcgtcaagccgccgaaaccagtgaggaaggcgaagacgggctctcccgattccacgagctggacgtggaattccacagtctgatcctgcgtgaaagcggcaacgaactgttcgcggcgctcgccggcaccatcgccaccgtgctgcgtgggcgggtggaactgggcaaatacccgatgaagccgaagccggccgcgctcgatgcgcacgacgccgtggccgatgccatcgccaaaggtgagcctgaacgcgcccgcacggccatgctcgacatcgtcgacgaagtggcccgcgcgctcaaattcttctagggtcgcatagccggggcgccctcccgcatgcgctcacaggccccgtcgtttgagatcggcgacaagttgcacatagaactcacgcacgtcgaaaccaggaatgttctcgcggttcagatcgatcatgtcggcgtgcgaaatgccgcgatcgccttgcggctcaatccatgtgaagctctcgccccaaaggaacgaagaccgggccaccagaccgtcattcggaccgtcgaaccatttgaccagcggatacgtgaaattcaacgggaacttgccggtggtcgcatgcttcaagcgtgaaccgacgctacggcacaccatacccgcgaaacggctgttgttcaacggttccggcatagggctccgaacggcatcggcatgcgctttggtctgcttgcgctgcggcgggttcgcggattcggactgcatctcggcgttgagcctcgcacaaccggcctgcgtgagatcgtgtacggcggccatgaaatccggctgggggtcgccaagccgtgcggcggcggcattgtaggcggcctccacctgacgctgcacggcctcgggaatgttcgacagcagataatcggcgaagccgcaaccgcgatgcggcgtattgatggtggtcagcgaggcgacgaacggcgcggccccgcatcgggcgatcgcgtagcgcatgtcaagaccgcctttggaatgtgcgatcacgtgcaccttgccgcagccagtcagttccacgatctgccggatgcgttcggtcagctcatatgcgctactgcgtacggacgccgccgactgatggttgccatagtggatggtcgcgccgtttttgcgcaactcgtcgggaatgcgcccccaatagttgagcacgttcgagtcacggaagaatacgccatgcaccagcaggatcgggtatgtcgtggcgcagatccgctcggcttcgcggtcggcgtcaagccgttccttcgcctcttcgaacacgacctccgcgtcggtcgtgcgaatgatcctgacgagcgcgatcagattggcgatcggaatccagccgcagatcaggccgatggcgcgaatcttcaggccgagttgcacggaactgacgtacacggcgatcatgccacgccaaaacagcaggctctccaccagaaaacagatgatcgcactgccgagccacaacttccaacccgaaggaagcaggtggaaggcaagtacggtctgcacgacaatcgacaacgcggccgaccaccagaacgccttcagcgccgccgttccccggtagcagattttcagattgcgcgcccgcaacgttttcggatgcgtcggattgccgggaatcatgatcaccgccgcagccaggacgaccgcgaccgcaacgttcatcgccgtcgcggccccgtcgagatgggcggactccagcgggagtacgcaattcgcgaccgccgcgatgatgatcgtatcgacggccagccacgatgcctccgtcgtcatgctgtggtgcatgcatccagattacctgcgaaaccggattgccgacaagaccggattgccgacaagaccggattgccgacagggcgtcgttcgtggacgtccgtctacggtgcctacaggttcgtgtcgacgctccgctgcagattgtcgacgatgatctgcaaggtgccgctgagctgatcgacgtcggtgaacatggtgccgaacagcgtatccagattggcttcgaaatccttcggcaggattgcgcaattgcgggaggcgagcttttccaagcgcttctcgccggggtgtgtgagccggttcaacgcgaacagcacatcaaaataggattccatgaacgcggccacgcggtggttcacggcgacttcgtcaccacggatcgcggctttgcggatctgcgcatcgtacgacggcagattgccatgcaacagtcgtgtattgcgttcgatgatattgcggcgcaacggttcggggaacggcacggagaagcgccgttgggccgcggcgaaccggccgttccggtcaaagacgatcgtgctggtgatcacgttatgccacaggcaggtcgtgtagccattgctggcgtggaaatgctcgaccacatcggcgacgccgttcatgaaggaatcgaggtcacggtacaggatgtcgatgtcggtgccgtcgttgagcgtgcagttgtcttcgttctcccagaaattattgtcgatctccatgcggctgcagtagtcggacagcagtttcttgcggcgctgcgtcggtacgggtgcggtcacatacaggtagacgtcgtagtccgacttctcgtcggcgttgccggttgcgcgcgaaccgcccaacgcaatcgcctcgacttcgggccatgcgtgcattgcctcaaatagttcctccacggatgacatcgtttacctctctccacctcttcgttgagtgacgcatccttgcgtcatcgctgcaaacgtttgacatcctagcacatggaacgggaagcgtggccgtccgttccatgtgcggcggcatgcggcggctcgtggtggcttggctatgcgcgggtcggatccttctgcaggagcaggaaggcgagcgccacgaccagcagtaccgcgatggagagcacgccgagcgaggcgttgccggtaaccgacgtggtggtggccaccagaaaggtgccgatgatcgaagctgtcttgccgaagatatcgtagaagccgtagtattcgttggcgtgctgtttggggatgatcttgccgtaatacgagcgggagagcgcctggatgccgccttggaacatgccgacgagaatcgcgagaatccagaattccacggcggaacgcagaaggaacgacgcaaagaacacgatgcacatgtaggcgaccacggccgcggtgatcatggttttcgcgccgaatcgattggccagtttgccgtagatgatggcgctcgggaacgccacgaactgcgtgacgagcagtgcgacgaccagctgggtggagtcgatgccgagctgtgtgccgtacgaggtgctcatggagatgaccgtgttgacggcgtcgatgtagaagaagaatgcgatcatgaacatccacaacggcttgttcttgcggatcgcgcggaacgtggaggccaattcggagaaggtgtggcggatcgcctcgccggtctggtcggcggtggcgcggtagtgcacctgcctgtagctggtgagcagtggaatggtgaacgccacccaccaggcggcggtgatcacgaacgaagcgcgcgtgcaggccacagtggtccatccgaacaggcccggcccaccgaaaatgagcgcgatgcatacgatgaacggcacggtggagccgatatagccccatgcgtagccatgcgaggaaacgcggtccatgcgctcgttggtggtggtgtcgaccagcatggagtcatagaaggtgagcgaaccgttgagtccgatggtagccagcacacacacgataaggaacgcaagccagccgagcggcaacgccatcgcacagcacatgaccacgccggtgaggaagaaaccggtaaagaacttgatcttcatgccctgcacgtcggcgatggaaccgagcaacggcatgagcacggcgatgaccagcgatgcgatggtctgcgcatagccccacgtcgacacgatgttcgtttcgcctgcggccttgagcagcgaattcgcataaatcggcaccacggctgtggaaagcagtacgaatgcggaattgccgacgtcgtagacgatccatttcttctcgcgggtggtcatcttcgcattcgcctccggcgatttcgaagtggtatcggcagtggtgctgtacgtcatgcgctgactcttttcgggtgaatgtcagttccattgtggcttattcgtctgtcttattcatcttagggctgacgcacggggctgtcgcttgcatgagatgaacagcgggtgaacgtactcatcgactacgggggtatcgggcgtgaggattgtctccgaacggaccgtttcgtcggataggatgggtaacaggacctgctcacgccgatggccgataggcccggtgaatgcaggcggagaatcgatgcaggttacggttatgcgacgatgattgccctgtgaccgccggattgcaaggagcctgaacatgggcgcggatgttccgaacgttttggatgcgaatgcggatatgctgcagttgctggtgaaccagccgctgccggacgccgtcgacatgatcatatggcgcggctccacgaatgccgagcaagccggtccgttcgaacggttcgcggcccgtctgctcgtcgaggcgggtgcggcgcggattcgcgacatcgcagccggatccgatcttgaggccattcggctgagtaccacgaaacgattctggctccgcttcgacgccggagagctgagccaggagcaatgcgacctgctgcatgcggtcgaatcggccctcaatcgcattgactatgccgatgacgaggcccatgccgcagtgcagggcggcatgtccgcggacagtatcgatgagcgcttctatctgcgcaaagcgcaggagtttatgagcgatgtatcgcacaagatcggcatcatcgatgggctgcaagctggtgaaaaccggttccgtaccatgcgtggcgtcgaaggcgtgcgtggcggtgactgggacatcagcactcgcttcgccaacgtatgcgaaagtctctcgctgccgttccgcatgagctaccgttttgacgaagacgcccgtgccggcgtgatggtggtgcgtttcagcgttccgaagcctgcgattatgccggttgaacgccagcatgcggacggtttcgcttcagcctatgccgtgcgattgggtggtctgctggcgtgggccgcattttcgtcgggagtgcgcgttacgcaggtcgatctgaccggctgcctcggcaatacggatggtacgcccgtgatttccatgggattcgaccgcgtgccgttcatgatgagcgcgcttcccgccatgaagaacggccaatgcgacgaaatgtcgctggacgtcgatcctctggccctgctcaacctgctcaagccggtgcgttaccgtggccagttcgacgcgaatcgaggatttacgcagattgaaccgttgaccatgccggctgtgttcctgcagaagcgcgtaccggaatggcaggatcagcgtgaacttccggaatcgttgcgcgggttcctgcgcgccgaccgtgcctgcgagctggacgtcatgcacgacgagtcgccgatttccaccgacgatgtgatcgcgatcgtcgaggagaacgaggattccccgatggtcgcggagctgcagcttgaagtcgcactgacccaactgggcgaggccggcgaagcgaagattggcgcgaacggcgagattccgctatattgcagccgttcggctggccgccttatggtgtcgttgctggaaggcgatgaacacacgcgttactggaaactgccggacgcggcggtggacgtgcaccagaacctcggcatgctcgccaaagacaacggcggcaaggagcgtgccgaaagcgagggactcacatgcatcaaactcggcccgacctgcatgaggttccgcgaggaactcgcacaggtgtacgccaagaacgacgaatacggcaaggccgcggatgtgctcatcgaagcgctcaaactggccgtgctgcctgtggactgcgaagtgctctactaccggctcggatacgcactgtggcagatcggccgtctgcaggaggcgcttgcctgctatacgatgatggtcaacggcggcaccccgttccgtaacgcagcccgcgacgaggcatatgagctgagccaacagatgggactggcttctgcggagatgtcgtacgacgatgcctgctccgcgatgcgcgccggcggcataccggtggcgccgagcgagaaggttctggacgtgctggcccgtgcggccatcgagctgaccgatgcgggattcccgctgttcgcccaagatgccgtctgggtattggggtcgcgtgtcggaggcgatgtgatgggttccgtttcggccagtttgcgtatgggcgtgatggaatcatagggcgtgtggcaggagcgtgccgccgggtcgtatcgggcagtcgtgccatcggtccatgttgccggctcatgttgccggtccatgtcggtagggtttgcgattggtcggggctggttgtataattgagaagttgtgtgttctgccacgcattcagttgcgggcgtcgaacgcgcagacttgcaagtcaatagtaattatagggagtccattatggcagctcgttgcgcagtgtgcggcaagggaccgcagaccggttacaccgtttcgcactcacatattcgcaataagcgcaccttccgcccgaacctgcagccggttcgcaccaccatcgacggcgagaacgttcgcgttcgcgtttgcgtcaagtgcttgaaggctggcaaggttcagcgtgctgaagcgtgaatcgcgaaataacagcttgaaaccccggtaggtccaaggccaccggggttttgctttatctgttcgcccttgcgggggtcatattaatgcggagcgaatatggggtatgtgacacaatgaagtgttatgaacgccacactggaaaccccgattacctcgatcgaaacgaatcgccgccgcgtcggcgcgttgaagtcattgggcgtggtgtcaatcggtgatgcgctgacctactatccgttccgtgtgaccgaaccggtgccgttgcgagccctgcgcgaagcgaaaatcggggagaagatggcattcgcggcgcatgtgcgggaagtacgcgtgttcccgatggcccgccggggattccgcctgatcgccaccgtggacgatgcacgattcgcgcaatcccgccgcgtcgccggatcgcttgcctcattggtgttcttctcgtatcgcaaatcatatgtcgactgggtgcaacgcaggttgcatgacggtgcactgctggtaatcgcgggggagccgagcgtctacaacgatcgtctgcagttcacccatcccgacatgctcaccgtcaatccgacggatatgcaatcagataggcaccatgatatgcaatcgccggcggaatccggggaatggaacgacgggcccggcgacgggcccgcgtgcgatccgctgcaatccaatctcccgcaatccaatctcacattcgacgcggaaacggtacaggaagcattgacccgcgtctgccggccgagaccggtataccatgcgaattcgcgcatctccagcgagcacatccacgagtcgattctgaaatacatggatgcgctgcgcggtgacgaatacctggccgcgcaacgggttgcaaccgtagaatccggacgagccggggaattcgaccagccgaacatcgaccgcgccgcgcagaccgaggcgctcgctgcagccgttcccgacatcgttccggaacatctgcgcgccgccgaaggcctgatgcatcgtgcggaagcgttcatggcgattcatgatccgacgaataccaaggattgtgatgccgcattgcatacgttgcgctacgaggaggcgctgatttgccagaccgcgctcgtcaagtcacgcgacgcctcgcgcaaggcggctgcttcggcctgctccgaaaccgcattgctggatgatttcatcgcatccctgccgttcgtcctgaccgtcgggcagcggcaggtcatcgccgacatctccgccgacatggcgtgcgattatccgatgcaacgactgctccaaggcgaagtgggctccggcaagacggtggtcgccgttgccgcgatgatgcaggccgtcggatcgggactgcaggcggtgctcgtcgcgccgacgcaggtgctggccgagcagcattacgagagcatctccaagatggttcagcgtatgggagtcgccgtacgcactgcggaatatggggaatcccacgaacaatctactcacaatcagggtgtggatggcggtgcacaagtcggcggaaggtcggctggtggggaaccggctggtacggggccgacaggtggcggactggctgccggggaatcgggcatcgggaatccgccgggcggggacattccggtgctgctgctcaccggtggcatgaaactgtcggcgcgtcggcgcgtgctcgccgtggcggcaagtggcacgccgtgcatcgtcgtagccacgcacgccgcattttccaagactttccaagcgccgaaccttgcactggcagtgattgacgaacagcaccgtttcggcgtagaacagcgcgaatcgctgaatgccaaggccgacaaggcaccgcacctgctggtcatgacggccacgccgattccccgcaccgccgccatgacctggttcggtgaccttgacatctcgtggcttaccgaactgccgggcggacgcaaaccgattcgcaccttcgtggtgcccgaagcggatgcgcataccatggccagcatgtttgcgttgattcgaagccgcctcgacgcaggggagcgcgcctatgtggtatgcccgcgcatcgatgccgattccaccgaagtcgacacctcacctgatgaggatccggggcgctcgttcgatgaactgtatgagctgggcgaggacgacgaacagcgtgcacagcgtccgccattgcattccgtggccgagatcaaggaacgtctggcgggattgccgcagttcgccggcattcgctttgccacattgaccggcagggatgatgatgagaccaaaatgcgggtcatggccgatttcgcagccggtgccacgccgattctggtggcgaccactgtgatcgaggtcggcgtggatgtggcgcaggccagttgcatggtgatctttgatgcggaccggtacggattgtcccagctgcatcagctgcgcgggcgcgtcgggcgaggtggcaccaattcgtgggcgttcctgatctcacgtgccgaggctggcagtgacgccgcgcaacgtctcgaagtgattcgcggatcgcttgacggcgcggaaatcgcccaggctgacttggaattccgcggggccggcgatgtgctgggcgatgcccaatcgggcggacggtcgagtctgaagctgttgcgcgtggtcaaggatgtgaaaatcatcgaacacgcccgtaccgccgcagaagagttggtggccgccgaccccgacctgcttggagaggtacagctcgccggtgccgtgctcgacttcacccgtggcaacgaaaccttccttaccagcaattaggcttgtgcccatgcgcgttatttcaggacgattcaagggtgtggcgctgaccacgccgaaaaccggtaccaggccgaccaccgacaggaccaaagaagcgatattctcgcatctggattcgtggggagtgctggacgatgcgcgcgtactcgacctgttcgccggaacgggagctttgggcatcgaggcgttgagtcgtggcgcgcgagaactcatagcggtggaatcctccgcaccggcggcaacgttgatcgcgcgtacgctgactgcattgaagcgcaaccgttcatgggaatcgggcatgagcgcgcgtgtaatcaaggcgcgtgccgaaaaatatgcggcaggggccgccgtcgcatcgttcgacgtgattttcatcgatccgccgtatatcttcgaaaccgaggcctgcaatcagttgctgtctgacctagcgggcggcgacatgacatcctccgataccatcatcgtgctggaacggtccacacgatccgatgacccgactccgccggacggttgggcgatcgccgaccgccgtgactatggcgaaaccgccgtgtactacatcgagcccgccagcgtcggtaatctctgacgtcctcaatccaccgacgctggcgggcgtgtcagcgtcggtagtttgggtgtgttctcaatccaccgacggtgaggggtgtctgggcgtcggtagtttgggtatatcctcaatctgccgacggtgaggggtgtgtcagcgtcggcagattgagggattcgcgcttgcgtgggtgaggaccggaaacctcccaccccaaggacatcagtgttttgcggtcagccttgtcgagctgggtgcaatcgagagcctcgatcaggtccgggcgcagttcgtcggtcttggacaacgcctcatcacgacggaaccgatccaccttgccatgatcgccggaaagcagcacatccggcaccttgagcccacgccattcggctggtttcgtgtactggcggtgctccaacaacgcattgccaccggtgtaggattcctcgacgatcgatgccggattacccatgaaccccggcatcaggcgcgtaatggcttccaacatgacggaaaccgccacctcaccgccattcagcacataatcgccgattgaatattcgcgtacgtcaacgccttgcgcacggtaatactgcggaatgcgagcatcatagccttcgtaacgaccgcaaccgaacagcagatgatcggcgtggctcagctcggtcgcatcctgctgcgtgaacaggggagcggacggattcggaaagatcagcaccgggcgaggcgaatcagcggcggtaccatccggaacttcggcagtcgtatcatccgtggaaatcgatgcctcaccgtcgcaagtgccgcaagcatgttcggcagcgcaatcgacggcatccgcggcaatcgtggccggtgcaagtcccagcaaatcatcaaggcactcgctccatacctccggtttcatgaccatgccggcgccgccgccgaccggggtgtcgtccacggaatgatgcacgtcgtgcgtccaatcgcgcagattgtgcgcctgaacggtgaccaggcccttcgcctgcgccttgccgagaagactgaggttcagcacttcgaaatactccgggaacacggacacgatatcgatcttcatactgctccacaatagtgggatgcctgccaagaggattgccaaaagggtcatcgaagcgggaagatcccgaagcgtgaacgtcgccgcgagcatcggagcatggatgccggggcaatccgatgtctacttcttgagacaaccatgcatggcgccggtcggcatgcgatgcatgtgggtcagattatgcggatcgaggatggaatcgagcaattcggggctcaacaccttctccttctgcgcgatctcacgcacggtggtgttcctgacgagcgcctcctgcgcgatggtcatggcccgttcgtagccgatatagccgatgagcgcagtggccagtgacgaggaacgcatgacctcatccatgccggcttgctcgttcaccgtgatgccgctcacgcagtgctcgcggagcgtgtccatggcgctggcgagcgtgtgcatgccggtcagcagcgcatgcagcattaccggttcgaatgcgttgagctgcaattgcccggcttcggcggcacaggatatggtggcgtccatgcccatgatcatgaacacgcactggttcacgcattccggaatgaccggattgaccttgcccggcatgattgacgagcctgcctgacgggccggcagatgaatctcctcaaaccctgcgcgtggtccgcttgccagtagccgcagatcgttggcgatcttacccaaatgcagggcggtacgtttgatggcgccggacaaggtgacgaaatcgccgacgtcgctggtggctcccaccgaatcgtcggccgcgcggatcggcagatcggtcagcgccgcaagatgccggatcgcacgctcgcggaaacgtgcgtcggcgcagatgccggtgccgattgcggtgccgccaagattgactacggcaagcagcgtttgttgcgatgacagcagtcgtgcgtcggcgtcgagttgcgaggcgaagccgccgaactcttggccgaaggtcattggaacggcgtcctgcagttgcgtgcggccgattttgacgatcggcatggtgcgctccgacaatgcacggaaggcgtcgacgagctggctggtgcggtcgaccagcatgccggaagcgccgatcagggcgagtcggcatgccgccggataggtgtcgttggtggattgcgacttgttgacggtgtcgttgggatggatgatgtcatactcgccgcgtgcgtggtggccgagttccaacgcacgattggcgattacctcgttcatgttcatgttggtggaggtgccggcaccgccttgcagcacgtcgacggggaattggtcgttaagctcgccggaggccacgtcttcgcaggctctgtcgatgagtgccgcctgatatgcgttgatattgctgagttcgccgttggcgcgggcacaggcttgcttgacctgcgcataggcgcggatgagttccggatggtcgctgacggtgatgccggagacggggaaattatcgatggcgcgtagcgtgtgaatgccccagtaggcttcggcgggtatttcggccgatccgatgcaatcgtgttcgattcgggtctgatgcgccctgcgggtcggcgcgatgggccgctgcggggtatgcagtgtcagtgccatggtgttcctcctggttgccggatgttttccggtccatggctcaccataatcgtaagaaatacatcgcacaagatgaatatatccccgatattccgtaggatgagtcgattcaatcgatggaatatcggggatatgctgctgaatatacttcgggggcggcgtccgggaatctgctttggcgggaatccgtttttttgagggattgccgttacagtcctggaatgaggccgcctggcggattcaaagtgagatagccttcctccaaatcgatgtccggtacgagctcgtcgacgaacggcaccaacgcactgttctcaacgaccacgccatcggcatccttgaccgggttggcgagacggattttcagcagccattgggccacctcaatcacatccacgaccttgccgattaccataccgggttcgagtcccagtgtgttgtcgtcggcaagacgtgcctccagaccgatcaggtctttcggataccactcgtcggcctgaagcatctcctccggatcgtcggcctcgccatagagcacagtgccgttggcggcttctgacgagtcacgattgtcgatgccctcgaatttgatgatccaacggttcttgaaggtacgggagtgttccaccacgtactcttcttcgccgtctttcgtgtacagcacagcaccgggagcgaatcggtattccggttcgtccgtaaagatctgcacggtgacttcacctttgagtccctgcgcacgtccgatacgacagaccctcagcagctcaggctgttgagggtcgtctacatgcatctcacgcaccacgctaggatctcacctgcgcacatccatgatgtcgacgcgcaccttatggtcggacagcgcctgtaccacggtgcggatcgcattggccgtgcggccgctgcgtccaatgacgcgaccgatgtcttccgggttcacgcgcacgcgaataagttcgccgcgcgcgttctcatgggacttgacggaaacgtcgtcgggaaaatcgacgatgttcttgatcagatgttccacagcctgggcgagcatgatcactcagcttccgcagccggctcttcagccggggcttcctcagtggcggcggcttcggcttcggcggcggccttggcggcagcttcagactttgctgccttcagcttctgggcctgggcttcgacggcctcaacacgagcggcggcatccggaccagcctcaacggttttcagggtgccctcagcaccgtcgagacccttgaacttctgccagtcaccggtgatcttcagcaggttcagcacctgctcggtcggctgggcgccaacgccgagccagtactgagcgcgctcggaattgatgttgatggtcgaaggctgggtgttcggattgtaggtaccgatctcttcgatggcgcggccatcacgcttggtacgggaatccatgatcaccacgcggtagaacgcgtagaacttcttacccatgcgcttcagacgaatcttggttgccaaaatggctctccttgtaactaggggtgtgtgtttcgtgttctgtgtggggcacggaatccgaaacccacgtgttcctcacgtcacgcgatagttagagggcttcgcgcgcgcgaataactgggtaattataactgtagggtctggacgcgccggcatcgcgcgtcggcaatcctcctgctttcccaatctaccgacggtggcgtgcccttagcgtcggcggattatggcgccacccaatctaccgacggtgacagcgtctcagtgtcggcggattgtgaagatcactcaatctaccgattctggcagcgccttgccgtcggtagattgtgaggtttcccaaactgtcgacggtggcgtgcctttagcgtcggtggattgggaaacgacttgccgggttgtccgattctggagaatcggacaaccgtgaggtgtttgggcgggtctgattgtccggacttccggaatcagccaaattggatacactggggaatctacgtattcgatcttgcaacgaacggtttgcaaagggagttgcctcgatgattatcgcgctttggattgtgttgctggtctgcatcgtgtggattgcgctcggtgaaatgcctgccggatgggacggccatctaccgttgccgtatctgattgcgctgattccgttcatgtggattccgacgctgaccatttcgattgctgggttcgcgctgcatgaaatcgctctcggctgcactgcgctggccgtctgccttgcatcgctattgcgtaaggaacagtattggatcaacaatctgcagacgcacaacactgcgcagatgattgccgacaggcttgcggaaaagcgtgaaacatcgcgtgaaaacaatactgaggagaccgagactggagcggaggacgcccgacatggtcagttccgcgtgatgacgctgaactgccgattcggccgtgcaaatgctgccgcgattgtggaagccgtcaaacgatatgacatcgccgtacttgcattgcaggaacttacggagaacctgatcgccgagctggatgcggcgggccttgccgatctgttgccttatcgtcagctgggcgaggtgaaggaatcggacaatggcgggttcaacggcgtctggattcgtgtggaaccaagtgatgcttcaccggtcacggtggtgattccggccgccgatgtgccgggactatgctttccgattgattcgatgcggagcatcacctttgcatcggcgcatccgaaatcgccgatgcgcggctgccgcgactggtctgctggcattatcggattgggcgccttcgctactacgcagaatcaaggtgatatcaccgtggtgatgggcgatctgaactccggtaccgatcatccgagtttcagaaagctaatgcggctgggattcaaggatgccgcgttggtcgaggcgaaaggtcgccgtgccacgttcccctcatggctgccgtggccgcgcatcattcttgatcatgtattgttcacgtcggggctggatgcctccgacgtgcggtccttcaccgtcgaaggtagcgatcatctggcgctggccgccaccctgactctcaaataatccggcatcctcaatctaccgacgcttacagcaccctgagcgtcggcagattgagacagcaccgcaatctaccgacggtgaagtgccctgagcgtcggcagattggatattctcccaaactgccgacggtgaggtgctgtgagcgtcggcagagtgaggagaatgagaaggcatacgcgaagagggcatcggattggcttccgatgccctctgttggcgagtgaaccgatccgtaggtgggtggttccgcaggcgggtggttcccagtaggggtggatggctcgtgagcggacgacccccatagcggataggtccgcaggcgggcgatcctgcagtcggaacgggtcagtgcagcagaccggacagaccgccgccgaagttcggcggcaactccgtgcccgaatcgcccatcacatcttgcaaaccagccggaagcgccggattctgcggtttcctggcgaaagcggagccactcgacttactgccggagttcttgccggcgagcttgtcccgcaatgctttctcctcagcctcgcgcttcatcggattgccggacttggaacccttcttcttgcccttcttgcctttgcctttgccgccacccatggacggaccgccgaaaccgggcatgccggcaccggctttgttgctcatgcggcgcatcatcttcgcggcctgctcgaaacgttgcagcaacgcattgacctgcgagacggtcacgccggaaccgtaggcgatacgggcgcgacgggaaccgtcgataatcgaaggatcgcgtcgctccgccggagtcatcgaacggatgatggcttcggtacggtcgatctccctctcgtcgaactgttcaagttccttacggtgcgcggccatgccaggaatcatgccgagcagattcttcatcgggccgagcttgcgcacctgctgcagctggtcgaggaaatcgtcaagaccgaaggagccgtcggaaatcttcacggcggccttacgggcctcctcctcatcgaactgcttctgcgcctgctcgatcagggtgaggatatcgcccatgtcgaggatgcgggaagccatgcgatccgggtggaagacttcgaaatccttcaatccttcgcccgtcgaagcgaacaggatcggcttgccggtaacggatgcgacggaaagcgcggcaccgccacgagcatcgccatcaagcttggaaagcaccacgccggtgaagtccacgccttcgtcgaacgccttcgccgtctgcacggcatcctgaccgatcatcgcgtcgatgacgaacaggatctcattcggttgcacggcatcgcggatatcgcgggcctgcctcatcagttcctcatcaacaccgagacggcctgcggtatcgatgatgaccgtgtcatacagcttctgcctggcgaacgccacggaatcgcgggccaccttcaccgggtctccggtggtcaggcccggagaggcaacggcctcaccgccggcggactgcacgcccttttccggcgcatacaccggtacgccggcgcgctcgccgaccacctgcaactgcgtcaccgcgttcggacgttgcaaatcggccgcgacaagcagcggggtatggccggaatccttcagccaatagcccagcttgccggcgagcgtcgtcttaccggcgccctgaagtcctgcgagcatgatgatcgtcggcggattcttcgcgaagttcagcggacgatccacgccggcgccgagcacgtcagtgagctcttcgttgacgatcttcacgacctgctgcgccggattcagcgcctgcgaaacctcagtgccgagcgcacgctcgcggatacggccggtaaaggaacgcaccacgtcgagcgccacatcggcgtcgagcagcgcgcggcgaatctcacggatcgtaccgtcgatatcggcctcggaaagcttgcctttgctcttcagatgcttgaaggcattcgagagcctgtctgtcaaagaactaaatgctgccataatgttccccagtctagccgtttgctcggatagatgactatgcgatggacgattggacgactattgcagcgaccaagtggagccctgcggaccgtcttcgatggcgatgcctgccgcgttcagtgcgttgcgaatcgcgtcggctcgggcgaaatccttggatttgcgggcttcggcacgctcggccaactgctcggaaacgagcttgtcgagcgccgcatgctcggcggaatcggcggcagcgccagccgcgcctcctgcaacgccgccattcacccatggttcggccagcggatccaatcccaacgtatcgagcatcgcacgcacattcacgagtgcttcgcgcacttcggctttggcggcatccgaatcggcgcggtcggccagtttcgacagcaacgtgttgccggaacggatcgccgtgaaaatcgcagcggtcgcaccggaaacgttgatgtcgtcattcattgcggcaacgaaatcgtccggcagtgcatccgcggaaatcgcggcgatctcatcatgggacggctgttcgccgacggcggcgccggcgcgttcgatgaaattcgccacgcgatcgtaggcggactgcgcttcggccagcgtctgatcggaccattccagcatggaacggtactgtacggaaccaagtgcgtaacgcaccacccaggcggaattttccgccagaaccgccggaacggacaagccgttgccgagcgacttgctcatcttttcgccttttgcggtgacccaagcggaatgcatccaacgggcggccgaatcgtaaccggcggcgcgcgtctgcgccatctcgttctcgtggtgcgggaatcgcagatcgaggccgccgccgtgaatgtcgaacatgtccttcagatagcgatggctcatcgcggagcattcgatatgccagcccggacgacccgtaccgaacggtgtgttccaacgggcgtcgagcggatcggaatccttcggggccttccacaacgcgaaatcgcgcggatcatgcttgtcgggcgacatgtcggccgggtcgatcgggttgtatttgtcgtcgccggcattgtcgacggacggtcccatcgcgtcggtgatcttggatgcatcatcggagacggcggtttgtttctgatgcgtcagttcgccataatgcggccagctggccacgtcgaagtagacgttgccggtcggattgccgttctcgtcggtcaccacataaccgtggccgttgtcgatgatcttccgaatgaggtcgatcatgtcgatcatgtggccggtggcgcgaggttcgtaggtcggcggctcgacgccgagcgtatcgtatgcttcagtgaactcgcgttcgtagatgtaggcacgttcccaccattgctgacctgcggcggccgccttgtcgagaatcttgtcgtcgatgtcggtgacgttgcgcacgaatgtgaccttgtagccgagacgctggaaccagcgacgtaccacgtcgaatgcgacggcggcgcggatatggccgatatgcggtgagctctgcaccgtggcgccacacacgtagataccgacctggccgggtttgagcggcacgaaacttgacaccgtgtgcgaggcggtgtcgtacagcttcagtccggttgcggcgccagccaccgtttggactgtgccggcaacgccggaagtgttggtattctgcggttcttgcgtgttcgtcatacccacgagagtattgccagaatcggacatactgatgcatggaatccgcaggctaagtggaaaacgattgtagctgatttgtcgaatttgtgaatgttgtttacgtgggtgatgtaacaatggttgcatgacgcaatcacaggtgttgattctgcagcacgtcccgtgggagaaaccgggacgcattttggatggcttggatgacttggggttgtcataccagatcatgaatgtggccaaggaaaagaagccggaattccctgatttcgacgaggtggctggagtggtgctcatgggcggaccgatgggtgcgctcgactacgacaagtatccggggctgaaggctgaagccaaactgacgcgtgccgcggtcagcgtcggcaagcccgtgctgggcgtatgtctggggcaccagatcatcgcgaccgcgcttggagcgaaactgaaaagcggggatgctccggaaatcggttttgcaccgatcaagcgtgtggataaacacgatttcttctcgatgtggaacaagacggtggatgtgctgcattggcataacgacgtggtgacgcttcccgaaggcgcacagccactggcacgcagtgagaagacaaagaaccaggcgttccgattcggctccgcgctcggattgcaatttcacttggaagtcacgccgaccctgctggaggagtggctcgacgagccgggtatggtcaaggatctgaaagccgccggcggatcgaaatcgaagctgcgcgaggcgtacgtcgaatgcaatccgcagctgcagcctcttgccgatcaggttttctccggattcgctgcccgatgcaattcatacgcgcagtcattgcagggctgaactgcccctcctcaaactaccgacgctgaggaggtcatttccgtcggtagtttgggatgctccccaatctaccgacggtgaggaggtcatttccgtcggtagtttgggatgctccccaatctaccgacggtgaggggccgtgagtgtcggtagattgaggaaggggattgttccggtaatcctccatgttccgccgttcccgctacattggtggattatgccgacttatgatttgggacttgaacacgtatcgctcgccttcgccacgaaaacgattttcaccgatgtgacgcaaggtgttttcgaaggtgaccgcatcggcatcgtcggcaagaacggcgatggcaaatccacgctactacacctgttcaagggtacgcaggaaccggattccggtcgagtgaccaaacgtaacggtctcacgttcggcatgcttgatcagcgcgatccgctcgatgacgacgccaccgtgcgcgaagccgcgctggagggtcgtgaggattacgaatgggccgctgaaacgaaatcacgtgagatcgtcgaggcgttgctcggcggcatcagcctggacgcgcggatcggctcgttgtccggcggccagcgccgtcgcgccgaccttgcccgcctgttgcttaaggattgggatattctcgccctcgacgagcccaccaaccatttggacgtcgtgacgattcactggctcgccgaacatctgaagaatcgttggtccgccggcgccggcgcattgctgctcgtcacccacgaccgctggttcctcgacgaagtgtgcgaatcgatgtgggaagtgcatgacggcgtgatcgaaccgttcgagggcggctattccgcctacatgttgcagcgagtggaacgtgaccgtcaggctgacgtgcgtgagacgaagcgccgcaatctggcccgcaaggaactcgcttggctgacccgcggcgcccgcgcccgttccaccaagcagaagttccacgtgaaggccgcgcgcgaactcatcgccgacgtgccgccagtgcgcaatacgctcgaactgaagcagatggcgacttcccgcctaggcaagcaggtggtcgatctgatcgatgtgacgcagatcttcgagcatgtcaacggcgagtccgacatcgaccccgatgtggcggaaatggaagcctcggcttcccgtgtggatgtggtgccggccatgtacgccgaaccgcaggtgcacggcagtgtggaagtcgccgtcgacgatttgaccgacccgcgactggtagatgccggcgttccagccgcgcaacaggccgttgaagcagccggaaggtcggttggaaaatcggccgggacaacagctgagcagacggctgcggttccatcgcaagacggtgcggagcctgacgattccgcgccgcaagtgacgtccgccgcgcagaagatcaccgtcaccggtcgtaagatcctcgatgacgtgacatggctgatcggccccggcgaccgattcggcatcgtcggcgcgaacggtgccggcaaatcgacgctgctgaagattcttgacggcacgatcactccaaccgccggtcatgtgaacatcggcaagaccgtgaaattcgcggtgctgtcgcagagactcgacgaactggagaaactcggcaaatacaagatcaaggaagtgctgagccgctacaagccgagctacatcgtggacggcaaagaaaccacgccggggcagatgatggagcgtctcggcttcgaatccgcgcagctcatgacgccgatcaaagacctgtcgggcgggcagaagcgccgcatgcagctgctgctcatcctgctcgacgagccgaacgtgctcatcatggacgagcccggcaacgatctcgacaccgacatgctcgctgtgatggaggacctgctcgacacttggccgggcacgttgattgtggtctcccacgaccgctatctgctggagcgcgtcaccgaccagcagtatgcgctgatcggcggtaaggtgcgtcatctgcctggtggtgtgcaggattatcttgatatgaccgaagccatcaagaacggtaagaatccgttcgccgatgagaagtctgcagacaagggacgcaggaacggcaataccggcgattctcatgcagacgtcggctcggctacggcttccgctggtatggcgaccggcgcaatcggcgattcggccggcagtccagccgctgattcggcaaaactcaccggcaaggcattccatgaggcatccaagcgcgttgccgcaatcgaacgcaagctggccaaactggaagagcggaaagccgagttggaatcgcagatggccgaacatgatccgagcgattacgaaggcctaggcaagatcaacgggcagttgcaggccgttgcagacgaatccgaatccctcgaaatggagtggatggagctctctgaacagctcgagtaggcccaagaacatagacccagaacatggatggcagcgttgccgtcggatgctgaggacgatgaagggcggtgcctgcgagatgaatcgcaggcaccgcccttcatcgtgtttcgatgtaactcagacgccgattagcgaccggtgatctcggaaccgagcaccttctcgctcagcgctttcggaccgcgggtcacggccaccgcgccggaacggaccagctcgatgatgccgtaatgttccagcagaccaagcagtgcgtcgatcttaccttcggcaccggtagcctcgatggtcagcgactcagggttcacgtcgaccacgcgtacgcggaacaggcgtacgatttccagcacgtcggaacggttggactcatcggcggccaccttgatgagcaccagctcgcgctccacggtggtgttcggatcgagatccacgatcttcagcacatgcagcagcttgttgagctgcttgatgatctgctcgagcggcacctcctccacgtcggccgtaacggttacgcgagagatgtccggacgttcggtaggggagacggacagcgagttgatgttgaacgcacggcgggcgaacaggccggcgatacgcgccagcacgcccggacggttctccacgagcacggacagcgtatgccgcttggaacccggctgggatgcaggatagtttgccatgattggaccttccttccgcttactcattcactcgttctcggccgcggctcgctgcagcggcttgatacccggcatgtaggtcacgtcgtcgttggaggcgccggcggcgaccatcggccataccatggcatccttccacacacggaagtcgatgagtaccggtcggtcgttgatcgcgttggccttcttgatgcattcgatggcctcttcctcggtgaatgcgcgcattccgacgcaaccatacgcctcggcgagtttcacgaagtccggcacgtccatgatgtcaggcgtgttttcgccatccagcagattcgtggcggaatagtgatgctcgtagaacagggtctgccattggcgcaccatgccgtatacggagttgttcagcagggcgatcttgatcggagtgcggtcgaggaacgcggtggccagctcttcggaggtcatctggaaggagccgtcgccgtcgatcagccacaccggcttcttgtcggcgaactcgcgtgcggagccgacgcgtgcaccgatggccgcgggtaggccgaagcccatcgtgccaagtcctccggaggagatccaggagtgcggcttgtcgaattcgatgatttgggtggcccacatctgatgctggcccacgccggaaacccagatggtgtcggggtcggccataacggacagctgcttgacgacccattgcggggcgagtgagccgtcggtgggctgctcccacttgatcggatagtcttcgacccacttgttgatgacttcccaccagtgacttatgtccggcttgccgtgcatggcctgctcgcgcttgatttccgggatgagatccttgagcacggtcgccacatcgcctacgatcggcacgtccggttgacggttcttgccgatttccgccggatcgatgtctatatggatgacgcgcgcgcccggtgcgaaagcatcgagcttgccggtgacgcgatcgtcgaaacgtgcgccgatcgcgaccagcagatcgcaacgctgcactgcgccggttgcggcgatggtaccgtgcatgccgagcatgccaagcaccttcggatcggaatccggcacgatgccgcgtgccggcagcgtggtgacgatcggtgcatcggtgatctcggccagctctttgacgagctcgcccgcgtcggaacgcaccgcaccgccgcctacatacagcaccgggcggtaggactgctcgaacagtttggcagcatcggacagcacgcggccgtgagccttggtggtcggattgtagccgggcagaatcatgcgctgcggccaggagtagtacatgtcaccggtctgtgcggtcttggtgatgtccaccaccacagggccggggcgaccggagcgtgcgatgtagtgcgcttcggcaagcacgcgtggaatatcctgtgcgcgcgtgacgaggtaggaatgcttgaccaccggataggtggctccgacgatatcggcttcctggaaggcgtccgtgccaatcgcgttcacgcccacctgcccggtgatcacgaccaacggaatggagtccatgttcgcatcggcgatcggggtgatcatgttcgtggcgcccgggccggaggtcacgatgcacacgcccacacggccggtcgccacggcatagccttcggcggcatggcctgcggcctgctcgtggcgcatcagtacgaatcggaatttcgtatcgtccttgatcgcatggtagaccggcagaatcgcaccgcccggaatgccgaaaacgtcctgaactcccagatcctccagcgaacgaaccagcgcttcggcgccggtcatcttctcgccgtcgacaatggtctgcttttcagtgttggcggatgccttgggcatgccgctgaatgcctgcagaggcgtaggtaacaccatgttccctctcatgctcgttcgtggaatcttctcgctgggcttcgtgtgcgggcgcgtcggtgagcgccgggtgtcgaagccccttttcggaatgcggcgtaatcgcttgtggcgactgggctgcgcaaattccttcgctagtaatcagtctatgctaacggctgacagcggcgaaaagccgcaacggcccacatgctggcgtgttgcgaaggggcgtggtataagccatcggcgtagtctactgagttcactgccagcccttcgccgatgagcatggtcagtggcgattgttcaaagccttccagccggcctcggcggcggcaagctgagccttgcgcttgctggagcccttgccgatgccaatcacctcgtcggagccttcgagcatggctttcgcggtgaaaacctgcgcgtattccgggccggaaaccgacatccggtaatacggctcgcccaatcccatgtcatgggccttgacggtcagcgaggtcttccaatccaatgccgggccttcggtggcgacttcggccaaagtgtcatcaaccagatggtgcacgacttttcgcgcctcatcgataccgtgctgaatgaacgtcgcgccgatcagcgattcgacgatgtcgcagagaatggaactcttctccgcgccatgctgttccgcctcgccgttgccgagcaggatgtacgggccgacatgcagcttctcgcgggcgatgtggcttaacgactcttcggaaacggctttggcgcgcatcttggcgagctggccttccgtcatgtcgggatgggccgcatacagcgtttccgtggagacgagttcaagtacggcatcgccgaggaactccaggcgttcgtagttcttcgcgcctggatgctcgtgtgagaaggagcggtgggtgagcgcctcgaccagcagttcgggggcgagtgtggtgccgagtgcttccagcagcacgttggcggtcatctcgccttccgtcgtgatggaggtggagatatgggtcctctcccgtgtattccccgtagacgcggcggttgggtcggcaggtgccgtcttccccttgaccgctgttggccgtatggccttggacgtcttggacgcttcaggcgtccgggggttcttggatgtggagttcttggttccggtctgatggtgagccatgattgcttccttcgttaatcagccgttgcgcacgtggcgaggcgaccagtcacctggtctcattgctacgcaaacaacgaattcgtgcataaccgtcgagcggaggttgattccgccgatccgcaccatggtcaagtctagcgagatgggggaccggaggatcgcggaccgaatcgcactgccccaaatagcaaaaaccctgccacccgtcgatggcagggtttcaatgctatataccgttagtcggcaacactcacttggtgtgaatggagcggacggcctcgcggtacacacggccgcggaaggagccgcagctcgggcaagccatgtgcggcagcgccggggcgccgcagttcgggcaggtaacggtctgggcggccttggccttccagtttgcgcggcgggaatgagtattcgcgcgcgaggtcttgtacttaggcagtgccatggtgtttcctctatttcgttcgaacgatatgagcttaagcgttcagtatcttaacgtgagctccgtacaaacgccaaatcgagcatcattcgccatcggcggtaccctcgagacgggccttgagtccttccagcgcggcgaaacggatatcggtcacatcatgatgatgatcgggctgctcgttcagatcgatgccacactgcgagcacagtcccttgcaatccggcttgcagagcggttgcagaggcagctcctccaccagggtatcgcgcagcagcgcctccaaatcggcccatgaaccgccttcgagcagcggataggtgtcttcggactcgtcttcgcccgcaacgatgtcgacttcctcctcggaggccttggcgccattcttgccgcccttgacggcggttttgtcttcataggggaagaaggcggtgacgttcacgtcccagttgcgctgaatcggcttcaggcaacgagtgcactccgcatgtaccggtgcgctgatgcgcgccgaaagaatcagaccgtcgacgatcgaatcgaaggagccgacgacctgcacatccgcaccctcgtcaacgccgacgatttcatcgccgatgccgctgggagcggggaacgtcgcgtcgagcggtttgctctgacctgcgcgggatgccacctgcgccacggaaaccgcccaaggggagtcttcgatacgtgccatattcagccttccggatagtcgttcgattcaaggtggggcaggtgctcgccggcctcgcgctggcggtcgtacagcacccgcaatcccgcttgaacatcatggtcaagcttgccgagctgctgctgcagcgactccatcaccgtggaacagtacttgtcggcgccctgcgtgagatgatccgccttcgcctgcgcctggtcgagaatatcacgcgccttccgccgtgcgatttcggtgacgttctcttgcccggccaggaactgcgcctgctcattcgcctcacgtaccgtatcggccgctcgcgactgcgcggaggccacgatcgcattcgcctgcgtctgcgcgctctccaaccgacgttcggcctcgcgcatcagcgccgatgcgcgctcgagctgtaccggaagcatcttcttgagctgatcgagctggtcggtgaacatctcacgatccaccttgaccacgctgggagcgaacaggctcggtttggcctccgtcaatgcggcctccatattgtcgatgatgtcgtacaccgtcgtgaactcctcacgactatgtccggtcgggccctcggcggaagcgtccggatcgagggtctcgcgcagatccggcagatccgacatcgagaaggacggcttgccggaggtccgtgcggctacggaagcggcctgcaccggctgctgcgaagtctggtcgtcatcatcggcctgcgcaacgtcatagggttgcgtttcgtctgtcatcatgctctcttttcgttcttcagcgcctcgccaagcagcggaatcacgcaatccggcaccatgccggtgacgtcgccgccgtgacgcgccacgtccttgacgatggaactggagatatgttccagatccggcgcggccggcagaaacagcgtctccacgtcggcgagcttgcgattgaccaaggccatgcccagttcggcctcatagtcgccgttctgacgcagtcccttgacgatgaccgtggctccgacccgcttacagtagtcggtgatcagcccggtggtcgaagcgaccttgatattgcggcaaccgcgctctttcagcgcctggcggatgatatcgacacgagtgtcttccgaaaacatcggtgttttcgccgcgttcaccgcgaccaccacatgcacttcgtcgaagaaatgcgcgcaccgctcgataacgtccagatggccggcggtgacggggtcgtacgacccgggacatactgcaatcgtcatagtcttaaaggtaccgcgcgcgggcgaagaagctgagcatctcctttatatatgaacggtgcgtggtttacgaggttatgatagaggacagttgatggcagcgtattgcatgggattccggctgcggagtccgctgccgaggttttgtaaggacggagcacaccatggcttggcatgcgattgttgatggcgtctatgatgacgccgacccggtttcgccgctttccgacccggatgcgggcaccggcactgcggtgctggagcgtccggaggaaaagacgcagcttgatgacggcggcaacggtgatgccgaccgtttcgcgcattacgtgtcgcgcgaccgcatccaggaatcgaagctcaccggtcgcccggtcgtggcgctgtgcggcaaggtgtgggtgcctaagcgtgatccttcccagtatccggtgtgtcctgattgcaagcgcatctatgacgagatgatgaattcctccttctgacgagcctatggcgtcggcggatccgcagaggttccgtgaaagcgggcaaaagcgggcgcatgcggaggacatatacgggggttcgcgcagtcttgcgtgagcccccgtatgcgtgaatcccgtgttatgccgagtcgatgtggcagatcagcgtgacgagatttcgtcgatgcgacgtagctcctcgtcggtgaacgtgatgttccgcagcgcgccgatattgtcgagcaactgttgcgggcgggaggcgccgaccagtaccgaagtcaccatgccgtcatgcagcagccatgcgagtgccatctccgcgagcgtctgcccgcgttcggcggccagaccgttcaggtcgcgaatctgctgcagctttgccggggtcagggcattctcctgcaggaaccgcccatcgtgcgcgattctgctatcggccggaatcccgttcaaatatcggtcggtcagcaatccttgatcgagcggtgagaaggtgatcaggcccttgccgaggcgatgtgcggtctccttcaatccgttgcgttccacggtgcggtcgaagatgttgtagcggttttggttgatgatgaacggcacatgcaattcgtccaggatggcggtggcctgttcgagcgtcgggccgtcgtagttggacaggcccacgtagagcgccttgccactgtgtaccgcggtggccagtgcgcccatggtctcttcgagcggagtgtgtgaatccatgcggtgatggtagaagatgtccacgtagtcgagaccgaggcgttcgaggctttggtcgagcgaggcgagcaggtatttgcggcttccgaggtcgccgtaagggccgagccacatctcgtagccggccttggtgctgatgatgagttcgtcgcggtgatggtggaaatattcgtgcagcagtcgtccgcagttcttttcggctgagccgggttccgggccgtagttgttggccagatcgaagtgggtcacgccgttgtcgaatgcggtgaacacgatctgccgcatggtgtcgtatggggtgatgtcgccgaagttgtgccagaagccgagggagacggccggcagtttcaggccgcttgcgcccacgtggttgtaggtcatgctgtcatagcgtgcaggcaatggcgtgtagacggtggttggttcgagcaaggttcctccttgaaaaaacggggctgttcgccgcgatgcgttgcgcggcgccgttgaatccatcgtcgcacctcaagtaaacttgaacgcaaatcgtggcaggtgatgcaccttctgccatgagggaatctcaggaaaaggatttgaggaggggagatgggctcgtacacgattcgcgagatggcgaggaagtttggcatgcagccgtccacgttgcggtactacgaagatcagggattgctgaccgacgtcggccgcgacgatgcggggcgtcgtgtctatggcgacgagcatatcgggcggctggaggcgatcgcctgcttcaagcatgcgggcatgagtatcgacgagctcaagcggttcttcgcctatgaaggcgacgaacgtacgcatatttcggacatggtggagctgttggagaatcgccgtgacgttatcgtcgaacagcgtgcctcgttggaggaggcgtatatgcacgtgttgcgcaagctgcatctgtacaaggatctgcagagcagttatgagaatggtacgcaacccccggattgggccgattacgacggcaaggacttccggtaacgcctcttctcaccgtcggcagttataggcacttcctcaatccaccgacgctgagtggttgtgagcgtcggtggtttggggggttgctcaatctaccgacggtgagtggttgtaggtgtcggtggtttggggggttgctcaatctaccgacgctgagaggtcgtgagcgtcggtagattgggttagaggacggtgacctcggtcgggatgaccggatcgcccttcatgaggctctgtgcgccgatcggcagttcggccagcgccttcgcacggtagttgtgcgcgttgacgatggcgtcatggccctgatattcggtgtggttctcgccattggtcacataatcgaccagcagatccttccagccttcttccggctggtaggcggccagcttttcttcggaaccggagatgacatgctcgcattcggccagcgagtattcataggaacgataggcgagcttgcggcccggaacagtggccttgtccttcgacttcttggcgaccggctgcatgtcgcccgcggaattctcgcgctcggtgagcttgtagaccatcgcgcaggtcggcgcgcccgagccggtgaccagcatggtgcccacgccgtaagaatcgaccggagcggtctgcagggaagccagcgcgtactcgtcgaggtcgttggtcacggtgatcttcgtattggtggcacccagcgcatccaattggttgcgtacacgctgggccagggaggcgaggtcgccggagtcgatgcgtacaccgcccaattccggtccggccacttcgacggccgtcttcaccgcctcttcgatgttgtaggtgtcgaccagcagggtggtgttcctgccgagtgcggcgatctgcgattcgaaggcgctgcgctcgtcgtcatgcaccagcgtgaagcagtgcgcggcggtgccgatggccttcaggccgtacatttgcgcggccagcaggttcgcggtgcccttgaaaccaccgaccaccgcggcgcgtgcggccgcgacggcggcccattcgttggtacggcggccgcccatgtccatgcacggacgatcctttgcggcgctgaccatgcgggaggctgcggaggcgacggcggaatcataattcaggatgctcagcagcaacgtttccagcagcgtgcattcgccgaatgtgccttcgacctgcaggatgggggagttcgggaagaacatctctccttcgcgatagcccttgatggaaccggagaaacggaaattctccaaccatgcgatggtttcggggctcaccacctttcggtcggagagaaacttcaggtcgttgtcgtcgagatgaaagtgttcaagcgcatcgaggatgcggccctgaccggcgaccacgccgtagtgacggcccagcggcagatggcgggtgaagatctcgaatacgcatttacggttggccgtaccgtctttcaggcatgcgtcaagcatggtgtattcgtacatgtcggtcatcagggcaggtgaataatccagcatttccaaagcctttcttgacttttggtgaaactgaccataagtgtagtccggacggtgaccaattaccgcttgcatatcatcatacgtgcatcgtcttggctctccggtccgaatcttcgctctgacgggactgaccgacggaacaagccgacggacggacaccatcttgtccctgcctcggcaggctccatctgcggcgtgactccaaggagggcaagaggacggatggtgatagtgtctcttggtaggaaatccgagattatcgacacgaaagcagtgcaatggtagcgattaaagacatgctgggcgagcagaccgtgattcgtgcggacgggcgcaaggtggacgaactgcgtccggttcgcattacccgccgtttcacggacgttccggaaggttccgtactcatcgaatgcggcaatacgcgcgtgatgtgcaccgccaccttcacttccggcgtaccgcgttggcgcaaggattccggcctgggctgggtcactgccgaatacgcgatgctgccacgtgccaccgccgaccgcaccgaccgcgaatccgtacgcggaaagatcggcggccgtacgcatgagatcagtcgactgatcggccgctgcctgcgcggcgtggtcgacatgaaggcgttgggtgagaatcaggtgcagatcgattgcgatgtgctgcaggccgacggcggcacccgcaccgcatccatcaccggcgcatatgtggcactggtggacgcaatgcgttgggccgagcggcacaggcacatcaaatccgccgacagggtgctcaaagactgcgtttccgcagtctccgtgggtgtgatcaatggcaagccgatgctggacctgccgtatatcgaagacagccaggccatgaccgacatgaacgtggccatgaccggttccggcgaattcattgagattcaaggcaccgccgagcatcgtccgttcagccgtgccgaactcaacgccctgctcgatctcgccgaacagggcaacaaggagctgcaggccgcacagcgtgccgcactcgccttggattgattgaaccctggtcattgatgagggcgcagactgaaaggaaaccatgaaaatcatcgtcgccacccacaatgagggcaagctggtggaaatacgccgcattctggaggaaaggcttggcgccggcgcagccgatgcggagctcgtctccgcaggctcgttgaacctgcccggtcccgtggaagatggcgtgacctttcaggagaacgcgctgctcaaggcccgtgacgtggccgcacgtaccggctgcccggcaatcgccgacgactccggcctgatcgtagacgtaatgggcaacgctccgggcatcctgtctgcccgctgggccggcaggcatggcgatgacaaggccaacaacgcgctgctgctcgcccagatcgccgacattccggaggccagccgtaccgcgcgattccgttgcgccgccgcacttgtggtgccgggcgccacaagggaagacgatacggccgaatccgccggcaaaccgtatgccattaccagtgagaccgtggagatcggtgagatgccgggtgtgctgctgcatgctccgcgcggcgagcacggttttggctatgatccgctgttcgtgccggacgaccagccgacacgtgccgtcgaagctggcgtgaggcttacctcggccgagatggaacctgccgaaaagaacgccatctcccaccgtggcaaggccttgcgtgcgctcgtgccggccgtggaagccctgctcaggcagtaggcggacggctcgctccccataggatcgcgcaggattaccgcgacatcacaagaagcggattcacgcgagcgcggtgaccagaacatgggtgccggtcatcatgatgaggctgatgatcgcgctgatcgacagggagaagccggcaagcttcgcattgccgagcaccttgtcggtgaacagcgtggagaatacggcaatcggcgccaggcagcacatggccacggcttcgcggatcgaagcgtcgaacggcagcatgagccaggccgcggccgcgaatgcgatgccgaacggcagtctccagccgatcaccttgagcagcttcatgacgtccgcacgaccggcgggcagatccataagcatgccgaccatgagcatcgcgcagaacgaattcgcgttcgacagcggttgcgccaatgtggcgatcacggcggggatcttcacgtccgcaagcgtcagcgcgatcatcagcaggtaggtatcgaacggtaccgagccgaagaatcccttgaacacgttccggaacagggccttgcgggcgagtcttttcgcgtccctgtccttcggctttacgtagggcagggtcggcgcatggccctgatactgctcgccaagcgtcttgccgggctgaatgtgcagcagggtctgcgtcatgacgttcgtgccggcggccaccatcacgcaattgccgatatcgaacatggcggccgggacgatcgcggccgtgccgagaaaggcctgtaccacgggaaaacagaagcatccgacattgaagccggaaccgttgagcatggtgaaggcgcgatcctgcacgggccgtttgcgtgatgtcagaaagatgatgaccggcggaatgaaggcgacgacaaagccgaacgcggagatccatagcatgctggaatcatgcggattcgtggcgaacgagtagacgattgcgcccggtaacaccaaatcgaacatggcggtctgcagaatgcggtaatcacgatccttgaatctgccggcgcgtttgaacagatagccggtaaggatgatcagcagcagcgcaatgggttgaatcagcgcggacatggggcttcggactctcttcgcttcgttatgtactcactctctgcacgctatcttagaggctggggtggcggtcgctccttcgcgacgccacattctggagatcaaagtgcgcgagatgggacttgaacccacacgtcaaagacacaggaacctaaatcctgcgcgtctaccaattccgccactcgcgcgtgatatgcaaaaccctagacgtgcacacacatctagggcaatggagccacttgacagaatcgaactgtcgacctgctcattacgagtgagccgctctaccgactgagctaaagtggcgcaatgcccgggaagcatacgctagccgcgcacaagacagcaatcatagcggagatgttcgatttgcacaaatcgatgaagtcggaagtgtcacggccggcggcgacctgcgatttgcgagacggtcgatttgcgagacaatgggcacatgagcagcgacactggtttcgacgacttccatgcgattattcccgccggcggcacgggcacaagactgtggccgctgagcagacgtgaccggccgaagtttctgtacgacctgctggggcaggggcgtacgctcatccaatccacttacgaccggctggaggcgatcgcaggcaagggcaatgtgtacgtgagtacgggtgtcgggcatgtgggggccgtgcgcgagcagctgccacagctcgatgcggacaatatcttcgccgagccgattccccgggattccaccgcggccatcgtactggccacggcggtgatcgcgcggcgttgcggcgaacgttgcgtggtcggttcgttcgccgccgaccatgtgattcgcgggcgccagtccttcgccgaatcggtgcgtcaggcggtggcgacagcccgtgccggctacgtcacgaccatcggcatcgccgcctcgcgcccctcgaccgcgttcggttacattcatcagggtcgttcgttggcggccgacgtgccggacgcacctgcggcgcggttggtggaacggttcgtggaaaaaccggatgccgcgaccgcgcaggcctatctgtcgaccggtgagtaccgttggaatgccggtatgttcgtgatgcgcgccgacgtgctgctcgatcacatcaggcgtgcgaagccgctgatgtacgaggcgatttcgcgtatcgccgacgcctacgaatcccccgtgcgaacccgtggggcggccgttgagcgggcgatggcgcgagattgggccggcatcgagaagatagccttcgattatgcggtggccgaaccgctgtcggtggcgggcggtgtggccatgattccgggcgatttcggatgggatgacatcggggatttcaattcggtggccgccttgctgccgagcgccaacgagcgcaatatcaaaatcctgggggatgcggaatccgtggcgtatctggattccgcgggcgacgtggtcgtgccggaaagtgggcgtaccatcgccctgctcggtgtcaatgacatggtggtggtggatacgcccgacgcgctgctcatcgcgccgcgcgcccgcagtcaggaagtcaaaagcatggtcgctcatctcgacaggctcggggccgaagacattctctgatttcacgttgcggattgcatacgattgcatcgtcacggattggcgtgttcgtgcatggtgatggcatgaaaacggcaatatcaggcgaatccgtacgtgagcggcggtcttcggattgtttttgtgttgttctgtctgcttttgtgagtatcttgtgaggtgaagagatacggtgcgtcgcgctggaaacggacgttgcgcgccgcttcacagtgatgatgaaaggaccctatcaaccatggccatcaatcctcccgttgacgccaccaagaccccggagtgggccgccctgcagaagcactatgacgagctgcagtccgaaggcatcagcctcaagcagtggttcgccgacgacgccgcccgcgtcgagaagctgagcttcgatgccggcgacctgcatttcgacctgtccaagaacctgatcaagccggagaccctgcagctgttcgctgacctcgccaaggccgtcaagctcgacgagcgcaccaaggccatgtacaccggcgtgcatatcaacaacaccgaggaccgcgccgtgctgcacaccgcactgcgccgcccgatcgaggacgaaggcaagtacatcgtcgacggtcaggacaccgtcaaggatgtgcgtgaggtgcttgaccgcatctacgctttcgccgacaaggtccgttccggcgagtggaccggcgtgaccggcaagaagatcgagaccgtggtcaacatcggcatcggcggttccgacctgggtcccgtcatggtgtacgaggcgctgaagccgtacgccgacgccggcatcgccgcccgctacatctccaacatcgatccgaacgacctggccgagaagaccaagggcctcgatccggagaccaccctgttcatcatcgtttccaagaccttcaccactctggaaaccctgaccaacgcccgcgaggcccgcacctggctgcttgaggagctcaaggcctccggcgccatcgacggttccgacgagaagaacgccgaagccatcaagaagcacttcgtcgccgtctccaccaacctggagaaggtcgccgagttcggcatcgacccgaacaacgccttcggcttctggaactgggtcggtggccgttactccgtcgactccgccgtcggcacctccctcgccgtggtcttcggcccggcccgcttcgaggaattcctgcacggcttccacgagatcgacgaatatttcgccaacaccccgttcgagaagaacgtcgtcgtgctgctcggcatgctgaacgtgtggtaccgcaacttcttcaaggtcgcatcccacgccgtgctgccgtacgaccagtacctgcaccgcttcccggcctacctgcagcagctgaccatggaatccaacggcaagtccgtgcgttgggacggcaccccggtcacctccgagaccggtgagatcttctggggcgagccgggcaccaacggccagcacgccttctaccagctgatccaccagggcacccagctgattccggccgacttcatcgcgttcgtgaacactccgaacccggtcaaggacggcgatcaggacgtgcatgagctgttcctgggcaactacttcgcccagaccaaggcgctggccttcggcaagaccgccgaggaagtccgcgccgagggcactccggaagagatcgttccggcccgcgtgttcaccggcaaccgtccgaccacctccatcttcggcgtggctctgaccccgttcgcggtcggtgagctgatcgccctgtacgagcacatcaccttcgtcgagggcaccgtgtggggtctggactcctacgatcagtggggcgtcgagctgggcaagcagctcgccaagcagatcaccccggccatctcccaggatgacgaggccctggccgctcaggacgcttccacccagtccctgatcaagttctaccgcgccaatcgtgagttctgattttcgattgagagcgtaaccgaatgcctcatccgtgtctcgcggatgaggtatttttattaattgctgtgccgaaaggcgggacgccgcataatcctgcttttccttgggtccagccggaacaatcgcaagattgcatctttccggcggattggcaatcctgcgcaggcagacctgcgtagaacatgacaggctgatgtggcaatcgcaagaatgtcgcaaaagcccttacctgtgcgctgatatgcggcggcgactcgaggaaacacaatggttaacgctattgaggcatttgacgccaagcacatgaagccggccgaggagatccctgctttccgtccgggtgacaccgttgaagtcaacgtgaagatcaaggaaggcaacaactcccgtatccaggccttcaccggcgtggtgatcgcccgtcagggcggcggcgtccgcgagaccttcgtggtccgtaagatcagcttcggcaccggtgtcgagcgtcgcttcccgctgcactccccgatcatcgactccatcaagctggttcgcaagggccgtgtgcgtcgcgccaagctgtactacctgcgcaagctgcgcggtaaggccgctcgcatcgtcgagcgtcgcgacaactccgccaagtgagtgtgatgcgcgaataaagcgtgaaatcggcccggcaactgcatggttgtcgggccgattcctatattcgacgctatgataaaggccattgcgttcgtaacgagacaaccgaaggacccaacatgaagcatgccgcaaacacaggcgccgataacggcttcgattggcgcgataccctgatatggtgcggggtgccggtagccatcgtactgctggtccgcatgttcctcatcggcttctatgtgattccctccggctccatgatggacaccatcgaaccgggcgatcgcgtaatcaccaccaaactcaccccgaaactgttctcgttgcgacgcggcgatgtggtggtattcaaagatccggaccactggctgcaggaggagaacagcggtagactcggcggcgactttctcatcaaacgcctgatcgggcttccgggcgacaccgtggcctgtgaggggccgggccagccggtcaccgtcaacggcgtggccatcgatgaatcctcgtacattcgctccggcgtggacccgagttcgttcgctttcaaggtgaaggtgacggccggccacatattcgtattgggcgacaatcgcgcgaattccgccgattcccgatatcatcaggatgactcctcgcatggtctggtgccgatcgacgacgtggtgggcgtcggcctggtcacctactggccgttgaaccgcatcggtgcgttggacgcgcatcatgatgtgttcaaggatgtgccggaaggatcggcgggctgatggcggtttccacggtgcctacgttgcaattggaacgtgagattgcagcgcgggggtacgatgtgatcgtcggcttcgacgaagtcggacgtggctcgttggctgggccggtcatggttggtgccgctgcgatccggacggcagatctggacggcccggatgccttggatgtgccggaaggcgtggccgattccaaaatgctgacggaacatcgccgtgaaaccatcttcgaatccctgaaatcatggagcgcctcatgggccgtcggagcgtccagcaatgcggaaatcgacgaatggggcatctcgtacgcattgggcgtggccgcgttgcgcgcgctggatgaagtggaacgtgagctgggaatcgccgatgacgggcggccgatacgggtcggtgccattctcgacggaccgaacgactacatcaccaaggctttgggtactttcgatgcgcccgacgtgccggttcccgcaacggtcaccaccaaggtgaaaggcgaccgttattgcgcgaccgtggccacggctgccgtcatcgccaaggtcacgcgagaccggctcatgattgaactgggtgagcgtcccgaatatgcgatctacgaatggcagcgtaacaagggctacggttccgctgcacatcgtgaggccatcgctgcgcacgggccgagcgacctacatcggatttcctggcatttggggtaggcgcatatcgggtatgccgggcctccgcctcggatcgtcggatgggattggttcgccgtcagtgaaatctgccatgcctgtatgccgatgagcatgcacgaccgcatacggcaatggattttgggaatcgtgcacgagaacaccacccaagggggtattggctcttctggattcagggttcgaatgcgggaattagcacccccttttcgtggattgctccgcacgattcttcaaacaggcctctttcgcatgtcgtgcatgaacgcaggggagatggatacgcctgcggaacgtccgcctgaagcatgcatgcccctaatccctgcggatgaggacgatcggaagattcatcctgccgaaggatggtcgtgacggtgcggtttccgtagcgtatgaaccatggaaaccacaacacatcatgtacttagggcatccgatctggtcatggactacgcagctcagcctggcactgcgaaacccgttgcccccgccatgcatatgctggcgctcaaccatgtgaacttcgccatccacgccggcgaaagcatcgccgtcatggggccgtcgggctccggaaaatcaaccctgttgcacgtattggccggcatcgtcaggccgactgccggaaacgtgagcttccgcggcaccgatttggcgcagctgcccgatgcggattgcaccaagctgcgccgcagtgccttcggattcgtattccagtccggccagttgctaccggaattgccggccgtcgaaaacatcgccctgccgatgatgctgggcggtgcacgctaccagcaggccaccgatacggccatgctgtggctggaacgattgggattgcgtcaacttgcggcccaacgtcccggtgagatgagcggcggccagatgcaacgcgtctccatcgcccgcgcactcgccgtgcagccggccgtcgttttcgccgatgagccgaccggcgcgctcgaccagagtaccggccgcgacatcatgggcatcctcatggacgcctcccgcgccaacggagcagccgtaatcgtggtgacgcacgatccgaacgtggccgccttctgcgaccgtacgctcatcatgcgcgacggccagctgtacgacgaaggtccgcacccgcagccgacacaggcagagctggcggccgcacacggccccggtgcgcaatggccgcaaccggtcaccggtgcgcacggcgttccgatgtacggcaatcctccgcagggaggcatgcgatgaacacgtttgcgctttggcggctattccaccgtcccggcacgcgcggcaccgccggccacacctcggtgctggccgtggtcgccttcgcggccgcgaccacgatcttcctcaccgtgctcggcggcgtgcacggtttcatctggcgagcctcggccgaccataccatcggctgtatgatcaaccccggtccgagcaattgcgcgcccggtacgtatgaggcatggtcgaaaaccctggaaacgggcaacaggctcatgattcatggcagcggccattggacggcggcacaatccgccgccgttatgaacacctacgccggaggctacgtactattggccggattcgcctgcatgctgctcatcgtgccgttcgtggcgctcgccggttcagccgcccgtctggcagcctcccgtcgggacgcccgtctggccgcactgcgcctggccggtgccaccacggcgcaggtcacgaaattgactgcgctcgatgcggcctcccaggctctgctcggctccctcatcggcattctcggctatgttgcggtgatgccgttgatcatgctgctcaacttccagaacaggcgtttcaccttcgaagagctgtgggtcggctcgttggccctgatcgccgtaatcgcaggcgttgcggtactggcactggcctcatccctgattaccctgcgccgcgtcgccatcaccccgctcggcgtgatgcaacgtacttcgccgcctctgccgaccaagtggcgtgtgttgatcttcgcggtgatcatggcggtcgggtatatggtgctgagcaacctgcagtcattcgcccgtttcggtgagggcacggtctacgcgatggtgttcggcatcatcttcctgtgcttcgccttggtgaatctcgtgggtacgtgggtggtgacgttccgcgccaagttgcgtgcccgccgaccgaaggatgcggcgaccatgatcgccatgcgccgtattctcgacaatcccaagcgtgcctggcgtaacgtgtccggtgtggcattggcggtgttcatcgccggcatgacgtccgtgtgcggattggtggccagcggcatcaacggcaatgtcgacccgcttgacccgagcatgctgtacgcacgcgacatcagcaccggtggattcctgacccttgctttcgcggccgtgcttgccgccgtcagctccggtgtgatgcaggccggcagcgtctacgatcaggtcggtgaataccgcatgcttgcgttggagggtaccgataagaccacactcgacaaggcgcgcatgatggaagtgatcacgccgctcaatacggtggtggccgtttccggtggctgttcgctgctgctgctgttcccgatcatggcggcggcactgttcaggccggccacgctgatgacgttggtcgcaggaatcgccttgtgctacgccctgatcgccgtgggggccatcgccgccaatcatgtggcccgtaccctcaatctcgccgattatcgcgccgacgattgagtgcggccggacatgatgattagctgagcagtgcggcgatgattgcgatgaaaaccggcgaggtgagcgtcgagaagaggatgccgtcacgtgcgaaggaaaggcccacgttgtagcgtgccgcatagttgtagacgttctggccggtcggcagggcggcaagcaccacgcacgcgtatagcgtggggccacggaaccccatcacgaagtagctcagcaggaatgcgatgatcggcatcacgatgttcttcagcgccgccaccgtgaacgtcgccggaatgtcggccttttcctgcaacggcttcgtgccatgcaacgacatgccgaacgccatcaggatcatcggcaccgcggaattgccgatcatgttgatcggatcgaagatgcagctcggcactacgaaatggccggccttcgcggagatcgcggagacgacgatgccgagcaacgaaccgatgagcagcggttgatgcaacggctgcttgaggatttccttcgcggagaccctgcctttcgtggtgacgtcgagtacggtcagcccgatcggggtgaacacggcctgctgcatgaccaggatcggtgccacgagtgcggggttgccgagaatgtaggtggcgatcggcaggccgatgttattcgagttgagatacagcgagttcagtgcgccgatggtcgcatccgccggcttcatgtggaagaacagacggttgagaatcaggaagacggctccgacgagcatggccgagaagaacgcgacgatgatggaggagtggaagatctcgaagatcttctccttcgacagaatcgcgaacatcaggcatgggctggacacgaagaagctgaagcggttgagcaccatctgcgcagtcggcccgccgatacgcaaccgtgcggccgcataaccggtgccgatcacgatgccgatgacgcagaagccttccatcgcgcttaacagacccggcatgcattcgtcctttccctgcttcccgtggtgattgagccgtcaatcaagccaatcatcagtgtggcactgtgcgggcgagattcgccggttcatctcaaaagcggtattccgatgccgtgatatcggtcggtctggcggataatgagacgcatgagtgaacttgagattggattcgatgcctccgccggcaagcaggccgcactgaacacgttgatggaacagatcatgggcagctattccgtcagcgatgacgaaggtccgctgaccgatgccgttgagacgttcctgacgatgcaaccgcacctgaccgtgcatcgtcatggcgatacgctggtcgcctccacggatttcggtcgtgcgcagcgggtgattttcgcaggtcatctcgacacggtgccggtaatcgacaacttcccgccgaaatggctggaaccgggcgatccgctgattcgtgaggatgtcgctgccgggcatgaaggcgaacgcgtgatctggggtcgtggagccactgacatgaagggctccgacgccgtgatgctctacctggcagccacgttgacggacgccagatatgacctgacgtatgtcttctacgaccatgaggaggtcgcagccgagaagaacggcctgcgcaaggtggttgaggcgcatcctgactggattgtcggcgatttcgccatcatcggtgaaccgaccgactgcggcatcgaaggcggttgcaacggcaccatgcgtttcgatgtggtcacgcatggcgtggctgcgcattcggcgcgtgcctggatgggcgagaacgccatccacaaggcggctgagatcctgaaccgtctgaacgcatacgagaatcgcgccgtcgaagtggatgggttgacttaccaggagggattgaacgccacgttgatctccggtggcaagggaaccaacgtgattcccgacgaatgccgcgtgcacgtgaactaccggttcgcgcccgataagacgcttgccgaggcgaaggcgttgatgatcggcgtcggcgcgggtgccgaactcggcaatggcgagcatatggccaccggcggcgtgtttgcgggcttcggcattgaaatgaaggacgaatcgccttcggcgcgaccgggactgaactctccgttggccgcttcgctggtggaccttgtcagggatcgcaccggccgcgacccgctcgccaagctcggttggacggatgtggcgcgtttcgccatcctaggcattccggccgtaaatctcggtgccggcagtccgctgctcgcccacaagcatgatgagcagctgccggaatccgatctggtgctgatggccgacctgctcgaggactggctgcgctgatgacgtatgcgctccgacgggtttcgcgctccttcctgtggtgggagcgcgggtgaattcggaaaattttccgttatgtcacgtcccgttgttttttgtgtcatacttgtagacggtggttctgcaagccgccgacgcatccgatggcgttgatcccctcgcgtgagattcctttttgtccgcgagcgccggtgtccgccgtcgcatgatgaagacttttgacggaagttgcttcctacgggcgccaagatgcgcggtcacggtgagagcgtgatgtgaggaccgtacgaagccgtgtaagcaggcgatgcgattgcagcgtgtcgcaaggagcatagtgcccagtaataccagtgagggcttcgatgagatcgaagccgtagtgtcagcaaatgcagattccaccgttccggctccgcgtcgccgtcgtggcggccgtcgtgtggtgcgtggcgtcggagctgcgggtgcctcccttgaactcaaggtcgaggagcatgccccggccccgttgttcgaggagccgaagctgccggcatccaagccggagtccgaggatgcggagtctcgggacgaggccgagccggtgcgtccggttcgccgtcgccgtcgtgccgcggatgccgaggatgaggtcgaatcccgtccggttcgccgtcgtcgcgcggatgatgacgatgaacgtgatgattatgaggctccgcgtcgtcgtcgtgccgtggatgacgatgacgaccgtccggcccgtcgtacgcgtggccgtcgtcgtgcctccgccgacgtggaattccgcgactcgcgtgacgagcatggcgaggaatcgactgacgaacgtgcgctggatgccgttgagatgttgccggaggggcatgtgcagcgtcgcggttcgcgtccgatgacgtcgttgctgttccaggagccggtgctgcccgccgttcccgcgccccgtgaggatgccgatcgggatgattcgcacgatgcagatgggtccgtggacgttcaggaggagcgttcgtcgcgtcgccgtcgccgtcgctcccgtgatgccgagcaggatgagcagagccgtcgtgacgaggacgatcgcaatgatcgcaatgatgcttcgggagacgatgaggagggatcgtcccatcgttcccgccgttcgcgccgactgaatgcgcaggaacgtcgtgccgcggcggaagtcgaacagatcgaagaagatctggtgctggatgacatcacctacgctcccatcgatgacgaatcgcgcagcggcaaggacgacgatgacgagggcgaggcgccgacgcgtactcgtcgccgtcgccgttcgcgcggcaatcatgaggatgccgacgaacagcagggtgcggatgagcagtcgggcaaccgtcgccgtgtccgtgatgaagatgacgacgaggatggcgccgtcacccgtcgccgtcgccgtcgccgtggcggggcgaagtccgaggacgccgaggagccgctggtccgccgttcccgcaagcagcagtacatcgatgagatcaccgatgtggagggttccacgcgccttgaggccaagaagcagcgtcgtcgcgacaaccgtcgtgaacgtagccgtcagagccagctcatggaacaggatttcctggcgcgccgcgagcatgtggaccgtctgatggtggtgcgtgagcgtgagcgccatacgcagatttccgtgattgaggacaacgtgctggtggagcattacgtttccgatatccaggaggttgcgaccgtcggcaacatctatctcggccgcgtgcagaacgtgctgccgagcatggaggccgcgttcgtcgacatcggtcaggcgcgcaacggcgtgttgtatgccggtgaggtgaactgggattccgcccgtctggagggccagccgcgccgtatcgagctcgcgttcaagtcgggggacccggtgttggtgcaggttaccaaggatccgatcgggcataagggcgcgcgcctgacctcacaggtcacgttggccggccgtttcctggtgcttgtgccgtccggcggcatgaccggcgtgagccgtaagctcagcgagcgtgaacgttcccgtctcaagggcattgtctcgaagatcgccccgaaggatatgggcgtgatcatccgtaccgccgccgagggtgcctccgaggaggccatcaccaaggatctggaaagcctggtccgccagtgggagcgtatcagcgccaagcgtgacgagttcctgcatggcaagcgtccgaagttgctgcagggtgaaccggacgtggccattcgcgtggtgcgagacatcttcaacgacgatttcggcaagatgatcgtcgagggcgaacgtgtgtacggccgtatcgaggagtatctcgacaccatggctcccgatctgaaggataagctcgagaagtgggatccggccgagcatgagggcaaggatgtgttcgacaagtggcagatcgactcccagcttcgcaagggcatggaacgtcaggtctatctgccgtcgggcggttcgatcgtgatcgaccgtaccgaggccatgaccaccatcgacgtgaacacgggtcgcttcatcggccgcggcaagagcctcgaggagacggttacgcgctgcaacctcgaagcctccgaagagattgcgcgccagctacgtctgcgtgacatcggcggcatggtgatgatcgatttcgtcgatatggtcatgccggccaaccgcgatctggtgttgcgccgactggtcgaatgcctggcccgcgaccgtaccaagcatcaggtggccgaagtcacttcgctcggtctggtgcagatgacccgaaagcgtatcggccagggtctggtcgaggcgttctccgaggaatgcccgacctgcaagggccgtggcttcatccttcacgatgagccgaccgtgtccgccgactatgacgacccgtacgccttgaagggcggcgatccgttcgtcaagacgaacaagcacggtcatggaacggacgtacaggtgccgaagggctcctcgccggacgtgaaggccaagctcgcgcagatcgcagcggccgccgtggccgcgaataatgcggaaccggacgaagaataagtgatcgcgccggtatgtcaacctgacacgccggtggcggacttgcggttgtacgtgggtgtgtgtaaattagattgctggtgtctggccgcgaggctcgaacgtgccgggcagtaagctttccaagttaataaaggaacggatatgtacgcgattgtgaaggccggcggccatcaggaaaaggtcgaggtcggtgacgtcatcctcgtcaaccgtctcaaggctcagaagggcgaaaccgtggaattcccggttgctcttgtggtggatggcgccaacgtcatcctcggtgccaaggatctcgccaagctcagcgtcaaggctgaggtgatcaacgacgaggccaagggtccgaagatcaacatcatgaagtacaagaacaagaccggcgttgctcgtcgcaagggccatcgccagcagctgaccgctgtcaagatcacggctatcgcctgattgacgcaggggttggagtcaaggaccgaaaggaacagacatggcacataagaagggcgcttccagctcgcgcaacggtcgcgattcaaacgcgcaatacctcggtgtgaagaagttcggcggcgaagccgtcgtggccggcaacatcatcgttcgtcagcgtggcaccaagttccacccgggcgagaacgtcggtatgggcaaggaccacaccctgttcgccctcaaggacggcagcgtgaagttcggtgtgcgtcgtgaccgcaaggtcgtcgacgtgattgccgcctgagatacgcgcaattaacgctttaggaagccgcgcccatgtggacgcggcttttctttttccttgccaaccctgtcccgcgtaacaacgaaagtagatacatgagtgattttgtcgatcgcgtgaccgtccacgtcaaaggcggcgacggcggtaacggttccgccggcatccgtagggaaaaatacaagccgttggcaggtccgaacggcggcaacggcggtaatggcggctccgtgatcttcctagccgatcagaacgccaacagcctgttggattatcgtttcatgccgcatcgcgaggcgggcagcggcaccatgggtctgggcgacacgaaggacggctccaaaggcgccgacctgattctgcccgtgcccgtcggcaccgtgatcttcgaagccaaggggccgcagggcgcacgcaagtatccgggcgaacaactcgccgatctgcgtcatgtgggcgacaggtatgtggccgccgctggcggcaatggaggccttggcaacgcggcgctggccaaccgcacccgtcgtgccccgggctttgcgctgttgggtgaaccgggtgaggaacgcgacgtgatcctggagctcaagtccatcgccgacgtggcgctcgtgggcttcccctccgcaggcaaatccagcctcatcgccgcgatgagttccgccaagccgaaaatcgccgattatccgttcaccacactggtgccgaatctcggcgtggtcatggccggcgattcgcgttacaccatcgccgatgtgccgggtctgattccgggcgcctcgcagggcaagggactcggtctggaattcctgcgtcatatcgaacgcacggaaatcatcgcgcacgtcatcgattgcgcgacgcttgaacccgaccgcgacccgatgagcgattaccgggcgctggaacatgaattggccgaatatgccgacaagctggaattgccgctgggcgcgattccgattccggaacgtccgcgcatcgtcatcctcaacaaggtcgacatgccggaagccaaggaactggccgaattcgtcaagccggaattcgaagcgctgggactgaaggtcttcatcatctccaccgcctcgcatgaaggcctgaaggaactcaactgggccttggctggtctggtggccgatatgcgtaaggaagtggcgaagcgcgagcaggccgaagaagaggcacgtgtggtcatcaagccgctcgaagagacgaagaaccgccgccgtcgtaacgacgaaagcggcagtgcgctcgaattcaccgtggaacgcaaggaatccggcaacggtgacgtctggtacgaagtgcttggcggcaagccggagcgttgggtcatgcagaccaatttcgacaacgacgaagccgtgggctaccttgccgatcgcttggccaagctgggtgtggaggatgagctgcgccgcaagggtgccaagccgggagacgaagtgcgcatcggacgcggcgatcgtgcggtggaattcgattgggacccgaccatcgcggccggtgccgaaatgctcgatggcgcgcagctgggcgctcgaggcgtggatctgcgactgcaggggcaggacgggcggacacagcgccgtacgaactccgagcgccgtcgccaataccatgagatgatggacgcccgtcaggcggtacgtgaggccatgatggccgaacgtgcggccggccactgggccgatccttccgtggatgacgaccgccacgacgaaaacagcctgttcggacgcggcgaatccgccgatacggacgacgtgaaagaatagagaccataccaagcccgctgatgtgccgatagcagcacatcggcgggcttttcagtggtatgccaatggtattcgaatgaccggtacgcatagaccgggagggacatatgaacacgccatcgcaggcacaggtgcgcagggccatcgctgaggcgcagaccatcgtggtgaaagtgggctccagttcgctgaccgaaccgagtggccacctcgatccggaacgattgaacgctttggtggcggctttggcgcgggtgcggctgatgggtgggcgtgtggtgctcgtgtcctccggcgccatcgccgcaggcttcggttcgctggggttcgacgcccgcccgaccgacgtcgctgaccaacaggcctgtgcggcagtgggacagggactgctgatggcgcaatacgaagccgcttttgcacggtacggcttgcgtgtagggcagattctcatcaccgtttccgatacgatcgccccgcagcagtaccgcaatgtgcgccgaacgctggaacggctgctcgacctgggtgccgtgccgatcatcaacgaaaacgattccctggcctccaatgagattcgcttcggcgacaatgaccggctgtccgcgttgatcgccaatatcgtggtcgccgatgccctggtgctgctcaccgacgtggacgcgctgtataccgcaccgccgagtgagccggaatccaagcgcatcgcgtacgtgccgaatgtggaggacgctttggaaaaggtgcaggtcggcggaacaggctcgaacgtcggtaccggcggtatggtcaccaagatggaggccgcgcgcgtggcggccgtctccggtatcccgtccgtacttacctgcgccgccaatgccggaccggccatgatgggcgatccggtgggcacggcgttcgcgccgattcacgaccgcggatcgtcgcgccgactgtggatcggctttgcggcacatccattcggcacgttggtggccgacgcgggcgccgccaaggccgtacgcggaggagcggccagtctgctcgccgcgggcgtgttggaggtcagaggcgagttcgccgcgggagacgccgtatggatcgacgacgaggccggcaaccatctggccaagggtctggccggcttcgattccgaggaaatcccacagatgcttggacgcaataccgctcagctcaagcggttcctgggagaggaatacgcgcatccgctcgtacaccgtgacaatctcgtactcgtctgaagccgaccgcgcgccgggtatgccggcgcggccccgcatgacgcgtgtcgcgagggttccgtttttcgtgtggcgggtctagcatgacagacatgactatggctgactggcagactctttccgaccgtatcaatcgcgtggctccgagcgccaccctagccgtcgattccaaggcaaaggcgatgaaggccgccggcatcgacgtcatcgggttcggcgcaggcgagccgaacttcccgacccccgcatcgatcgtcgcggccgcggcctgcgcggtgcaggatcccaagaactatcggtacacgccgactgcgggtctgccggaactgcgcaaggcaatcgccgacaaggtgtcgcgcgattccggctatgaagtcgacccgagtcaggtcgtcgtgaccaacggaggcaagcaggccgtctacgaagccttccagatcctgctcgacgagggagacgaggtcatcatccccgccccgtactggaccagctatccggaggccgtgaagctggccggcggcgtacccgtcgaggtattcgccggcgccgaccgcaacttcgaaccggatatcgacgccatcgaagcggcgcgcaccgaacgcaccaaggccatcatcgtgaccacgccgaataatccgacgggtgccgtatggaagccggaaaccgtcaaggccatcggcgaatgggccttggagcaccatgtatgggtcatctccgacgaaatctatgagcatctcaactatgacggtgcgaagaccacgtacatcggtgccgtggtgccggaagtgcgtggccagctgctcgtgctcaacggcgtggccaagacctacgccatgccgggctggcgtgtcggctggatggtcgctccggcggaagtggccaaggccgcctccaagctgcagggtcatatgacctccaacgtgaacaacatctcccagcgtgctgccatcgaagccgtttccggcccgcttgacgccgtctacgacatgcgtgccgcgttcgacaagcgccgccggaccatcgtgacggcactgaacgacatcgaaggcgtgaactgcccaaccccgacgggtgcgttctacgcgttcgccgatgtgaccgcattgctgaacaggccactcggcccgaacaggaccgtgttcgccgataccgccgaactggccgcggccctgcttgacgaaggccatgtcgccgccgtgccgggtgaggcgttcggtgctcccggctaccttcgcttctcctacgccttggctgacgacgatctcgtcgaaggcatgaagcgcatgaaggcatgggcggaggcataggcggacggcccgataccgttgactggaaaatggattcgcaccccggtgacatgccgaggtgcgaatcttttttcgttggaaaatagcggttttttgactgttgatggaaaaacgattggacgaagtcgcaattacccgctactatttcaacttggcggttttgccgtttacttcttgcgtggtttttcgcataaaatcctcgccggcaagtagaaatggcagagtacacctagggaagtggcgcaattggtagcgcaacggtctccaaaaccgtaggttgtgggttcgagtcccgccttccctgccaagttcttacaacaagccaagcggaggatcataatggcgaaggcaagcaatcgcgaaaaggccgtcaagccgaacatcttcatgcgcattggtttgttcatcaagcagattatcgacgaactccgcaaggtagtgaccccgaccagcaaagagctgttcttctgggccctcgccgtgtttatcttcgtgctgttcctgatggcactggtcaccggcatggacttcggtctgggcaagctcacgttgtggatcttcggctgacagacacgtgaaggtgaaggtgcatgactgacgaagtgattttcgacaacctcgacgaagctcccgaggctaccgaagaggctgtggctgccgttgaggcgttgccggaggctggggagaccgaggtctccgaggaaccggccgccgaggaaaccgccgagcagatcgaaaccgaaacctctaccgatgccgccgttgaatccgaacaggatgagcgtgatgcaggtaccaaggcagtcgaggaattctcgaagaatctgcgcacgcttgagggtaagtggtacgtgttgcacacctactccggctatgagaagcgcgtgaagaccaacgttgaatcccgcgtggccagctttggcttggaagacaagatcttccagatcgaagtgccgatggaagaggtcgagaagcacaccgaaaagggcaagaagatcatcacccgcgtgcgtgttcccggctatgtgctgattcgcatgcttcctgatgagaacgcccgtcgcatcgtgcgcgagaccgaaggcgtcaccggcttcgtcggaccgaccaaggaaccggcgccgctgtcgcgcaaggaagtcgtatccatgatggccccgatgatcgcctccgaggcgctcaagaaggctggcgacaagccggccgcggccaagaagcgtaccctcgaggtctcctacgccgtcggcgatcaggtcaccgtcaccgatggtccgttcaccaccatggtcgccgttgtctccgacgtggagccgaccacccagaagctcaccgtgctcgtgtccatctttggtcgtgacactccggtggagttgggcttcaaccaggtcgaaaagctcgcctgacgtcccgtgacggtgtgccttgacgtcacacatgttccggaagtcgggaatcaatcgtgaggaacctgaaacttcgaaccccgcagcgatgcggggttcttcggtattcacgcaatgtcgcaacgcaatgtcgtggcgggtaggcataatgggaaagcttgtgtctggagggtttcgtatgtccgaaacgagctcgtggcccgctagcacagcacagcaatatacgttgcggaaggaaccggttatgggaaaccacatccggtgccgctaacaccgcttcatagaaagaagaaccatacaatggctcctaagaagaaagtctcggcgctgatcaagctccagattcaggccggcaaggccaatccggccccgccgctgggcccggctctgggttcccatggcgtgaacatcatggacttctgcaaggcatacaatgcccagacgcaggacaagatgggtcaggtcatccctgtcgagatcaccgtctacgaagatcgttccttcaccttcatcctgaagaccccgccggcggcatctctgctgaagaaggccgcgggcattcagaagggtaccgagaacccgctgacccacaaggtcggctccgtcaccaaggctcaggtccgtgagatcgccgaaatcaagatggccgatctgtctgcacgtgacgtcgaagccggcatgaagatcatcgagggcaccgcccgctcgatgggtatcacggttaccgactgagaggagaaggacaaatggtaaagcgttccaagaagtatcgcgaagcggccgaaaaggtcgatagcaacaacctttacaccgccaacgaagccatcgctctcctcaagagcatgccggagtacaacttcgaccagaccgttgaagccgtgctgcgcctgaacgtggatccgcgcaaggccgatcagctggttcgcggttccgtgaacctgccgaacggcaccggtaagaccgccaaggtcctcgtcttcgcccgtggcccgaaggccaccgaggctctcgaggccggcgccgacatcgtcggtgacgacgacctcgtcgagaaggtcgccggcggcttccttgacttcgattccgtcgtggccaccccggacatgatgggcaaggtcggccgtctcggccgcgtgctcggcccgcgtggcctgatgccgaacccgaagaccggtaccgtgaccatggatgtcaccaaggccatcaaggacatcaagggcggcaaggtcgacttccgtgtcgataagaacggcaacctgagcttcctcatcggcaagctctccttcaccgagcaggctctggaagagaacttcaaggctatcgccgacgaagtcaagcgtctgaagccgtccactgtgaagggccgttacgttaccaaggcgaccatcacctccacgatgaacccgggcgtcccggtcgatccggcgattctcgcctgattccacgcctggctgtaatcaacgcctgacaagacccgcacctgtcgattgacggatgcgggtcttgtcgtatgcggaaccatgcggaatcaggagggatggattccgaacagccgcaatcgagtgcggctcagtgctcacgcatgcggccgatggcaagagcggtggtgagcacataggcgtcgcgcgggtcggtggcatcccagccggtggtctccgcggcgcgcttgagtcggtaacgcaccgtgttcgggtgcacattaagctccttggcggtattctccaacgaactgccgtacctgaggaacgtggagaccgtcagataggtcggatcatcgggattgtcgccgcgcaatacacggtaaacgttccgatacagttcttcgcgggcgtaatcgtcacccagcagcgcacgttccggcagcagttcatccgcacgcaacgggcgcgactgcgtcgatagggccggtgccgcctgcaatgagaacaacgtctcccgcagggcatgcgaggcaccggcgacaccggaacgtaccggactcagatacacgggatcggattcggcgaatgccggcatcaccgaggtgcaggtgacctccggagtggccgcgccaatctgccgcaccaacatcagcagaaaactgccgtatgtgccaataatcgcgttctcaccgcctaaatcgcgtacggacttgcgggcggccagagaagcggccatcgggttggaggccggcaccccgccgatggcgaagcagtcgaatgcgccgcgccatgcgagcacattcagcaacgaagtgacgcgttcgtcggcgatgccgttcatcaggcattcgaacgcgagccgttcgatggtggaatcgtcggtatgacctgacagcaggtcaagaatgtcagcctgatcggaattcatactcgtcaagtctagtcggtgacgccatgaattgcggtgggtcgcgtgcgacgggtgcatcgcgcattcgggccgtaacggtaatatgccggatatgaccgaagtacgaaaatccaggagccgtggtgcgcgactctccggcttttgccgttggacgctggccgtattggcatgtctgtggctggcatggtgctgcgccatcgggccgctgtactggtacaacgtgggattggacggcttcggctgggcccacatgctgattctggcgctttccttcgccgtgtttttcgccatcgtcgtggcactggtcagattcggacggggccagcgcgtactgccgaggtatttcacacgacggcatgagcggttgcatgaagaagtcgagggcacgccgaccaccattctcggcatcgtgctgaagcatgtgcacgatgccgcgcatagccgtccggggcgtgccgtgcatgccgtggtcatctgggtcggacgcaagctgacgcgttgcaccgactgctggtggaagctcatgctggtgttcgtgatcggctggctgtggattccgaccacattgctggctgcgtacggtgccgacatccgttcgcagatccgtgagttcagctgggcctggaaccagtggaccgggctcaaacagccgtatatcggtttcttctcgttcgtgccgatggacatctatccgaccgcgcactacatgtggcctgcgaacccgacctatctgaccgatcagcacaatatcgtgctgacggtgttctacggcgccgtagccgcaatctcacgctatttcacggattccaatgatgcgggcatcgtgacgctggcggcgttgcagtggctgttcgccgccttctgctgcgcggccaccgcaaaccgttttttcaacctgccttggcgcagacttggcgtcggttccttcgatttctcccatccggaacgtcatgactgttggaatcagcgtgatttcatgcatccggaagccggtgtggtcgcgcgcccctcccgtttgcgcgccggtgcgaagacgcgtttcgtgatactgctgttcttcatggtgtgcccgttggccgtgttcgccacgatctcactgaccaagtcgccactgttcgccttcgcgttcgtatggtggttcggggtgtggtacgaactgcatatgacacatatcaaggcattgccgaccatcaacggcaagccgacgcgactgcgcaagcgttccatgctcgcattcttcatgtcgagcgtggtgatgctgatcagcgcgaaatacgcctggtacatcatcgtgctggcgttgatcctggcgttgctgaacgaccgcaagcgctggaagacctatgtggtcaccctgctgctgccgaccgtgctcatccatggcggcatcgtattcctcgcggattccggtgcgatcatcagcggtgaccccatcgaaagccgaggcattcagctgcagcagatcgcgcgcgtggcgaaatacaatccgcagggcattccggcggacgcggcctcgaagctcgagccgatcttcaacctcgaccaaatggccgacgcatattaccagcaggacgccgacccggtgaaatcctccggcatccaatccaagaaggtgagctacaagtggcgcaccgtcaccaaagaggacatggagaacttcaacaaggcgtggctggaaatcgtcaaggcgaatccagtgattgcgctggacgccttcttcgccgaatgcttcggctacttcgatgtgaccgacctgccatacgtctcgatggactattacgtgaacaacgattatgtgcaggaagataacgactggattcacctgtacaaccatgagtggcgcgacaaagtggccgacttcgccaaacagtggaggaaaatcccggtgttcggctggttggtgcatggcaacctgtatgtgacgctcacgctactgatcggtgcggccgaggtggtgctgcgtcgctggcgttcgttgtcgtggcatctgccgttgctgctgctcatgggcgtgatgatcaccgcgccggcgaataatttcgagcgtcacatgctgcccgtcgccttcgtgttcgggttcctttgcttgcagttctggcgtgagtcgcgccggcaacggcatacggcgatgccgaccggctcctgatgtctcctaaagggctacctgcccgccgtgtgagcgctttcacgcggtgagggcgtcggaggtttgccgctgggtgtgatagccgctattttccaacggtctgtttttgggttaggtttgaagccgtgcggcggtactcgcacggcgggcagatagcatgtcagggggtattggatgggattgatggattcggcgttgacgatgccgggcacctgtgttgcggccgattgcgtgttgtccttggattcggtgggctctaccaacacctacgccgccgatttggtgcgctccggtgaactgtacggtgatgctcggcgtggaggtgagatcgccgtggtgtgtgccgatgcgcagaccgccggccgaggtcgcctcgaccaccgatggaccagtaggccgggggagtcgttcaccgtcagtttcgtggtgaacgtgcccgtgtcgatcgtgcgcgacgcatcgatcggcggttggttgcagatgatcgccggattggccgtactggaggcgattcgcggggcttgcccgcaccggagcgccgagccgcagctcaaatggccgaacgacatcgttgtcggcggcaggaaacttgggggcattctcgccgaaatggtgccgattcccgattgcggcgaacgtgtggcgatcgtgttcggcgttggcctgaacctcaacgttcccgtcgaccgtttgcctacggagaactcaatctccctgcagatgctcgcaagcgacctgccggacccaaccgccttgcgggatgaattggctgcccgaatagtgcgagatctcaggttgcgtctaaccgatttcgaggccgaccctcagcgcgaggccaaacgttgcctggaagccatgaatgtggtctgttggaccttgggcaagccctgtgaagcgcatttcaccgacggttccgcccttcaaggccgggcgatcgcccttaaccctgatgcctccctcaccattcgggatcgatttggggcgcttcaccgagtcaccaccgccgacgtgggcgtactccaaaaccggtgattcgacgaacggaaggcgtatcatgccctcacggtgaggtgaagggcggcatgcgtcaatgggtgatgcgttccggtccctaccgaagcttcgccaatccggcagccactgccgaggcgacgacggccttgatgacgtcgccgaacacgaagcccatggaagcgacggccacgaccggcagggatacgctcgtgacggcggactgaatgatgaatccgaagagatagtccacggcgacgcagcccaccaaggccgcgccgcaataccgtgccgcggtcagcatgccgcctttggccgagtcggtgcgcgcttcgcccttgagcagagaggtgatgacggcggcgggcaggaatccgagcaggaacccggcgctcggtccgaccagcgccagggtggaggcgccaccggcgaataccggcagtccgagggcgccggcggccagatacagggcgatggctgcgccggcctgccgccaaggcagcatgagggcggcgagcatgatcacaaaggtctgcagagtgatgggcaccggggtgccgggtacgggaatttcgccggcggcggaagcggcccacagcaggagcgcaaacagcaccggtttgaatatggagccgaatttgccgttggacagcgatttgatggtaaggattgcgtggtgcatgaaatctccttgaaatagcgacgaaagaacgtgattcgtcaatcgacgggcttaatcgtagaaaaatgaagttacgactacgtttgtggagccgtacaaaaagaccgcgtcacttttgtggaaaacgagtgtccgtgcagccgcaaaagcgagcaatgttgacaacatgcctaaaaacgtcaacacactcttggtggccaatcgtggtgagattgcgctacgtgtagtgcgcaccgcccgcgaaatggggattcccacggtggcggtgtatgccgaacaggaccgtcatgcgcaatatgtgcagatggccgatgacgcgtatctgctgtcgggcgacacctacaaagacacgtatctcaacgaggatctgctcatcgacattctgcaccgcagcggtgccgatgcggtgcatccgggttatggcttcctttccgaggtggcgagtttcgcgcagaaggtgatcgatgccggcgcgacatgggtcggcccgaatccgaaggcgctggtcgatctgggagacaagatcaccgcacggcgagtggcgaccttcgccaaggtcccgccggtgccgggcatctcgcattcgatttccgacatgcgcctgctgctcgacttcgcgcatacgcacggctatccgctgatgttgaagcgcaccgacggcggtggcggccgcggcatcacgctggtgcgcaacgacgatgagcttcgcggattctacatgaatcatgacgcgctgcagggcggcgacctgaacgaatacttcgtggaacgcttcatcgacaagggccgtcatgtggagacgcagtgcggccgcgatacgcatggcaacttcaccgtgtattccacgcgcgactgctccgtgcaacgccgcaatcaaaagctggtcgaagaggccccggcgccgttcctgcccgacaccgtgatggaacagctcgcccgttactcccgcaacctgttcgaagccgtgggctacgtgggtctgggcacctgcgagttcatggtgaccgagcagggcaaggtgtacttcctggaggtcaatccgcgtctgcaagtcgaacataccgtcagtgaggaggtgtgcgggcttgatctggtgcgcgagcagctgacgattgcgaacggcggtgagctgacggtggagcatccgattcgaggccatagcttcgagctgcgcctcacctgcgaggatccggccaagaacctgacgccgagctccggcacgctcaccgcgttgcgttggccgtccggtccgggcatccgcgtggattccggtgtgcttgaaggcgacaccatttcgccgaagttcgattcgatgatgggcaagctcgtcgttaccgcctccgatcgggcgaacgccgtggcccgcgtgcgtcgtgcgttggaggagctgagcatcgagggcgtaccgacgccggtcagcctgttcgaacgaatcttcaacgatgatgaattcaccgccgagcatggtgccgcgtatgacgtgagcacgaagtggctggaacgtaagtacctcaataaggaggccgcctcctcgcacggcggccagccggcctcgctgagcggtgccgccgacgaaggcaaggatatcgaatccagcgagaccttcgtgatcgaagtcaacaaccacagggtgtcgctgacggtaccgaccgacatcgtggcgaacctgaccggttcggccaaggcccgcgacgccaaacgtgccatccagccgctgcgagggcagggtctgcatcacgtcaaacggggcccgcaggccagcgaagggcagtccggcatcattgcctcgccgatgcaggccgtggtcacgcgcatcaacgtggccgaggggcaggaggtcgccaagggcgatctgctggtggtgctcgaatccatgaagatggagaactacgtgtacgcgccggtcaagggcacggtaacgaagatcttcgtcggtccggccaacggcgtggaggcgggggagacgctgctcaccatcaacgtggcgggtacaacccccgaatccaaggacgaggaggccgagcaatgaccgatattctcaccagcccggccgtgcaggatgccgtggatcatgtcgaaggctcgcagccgatccgtcccgcggtgttgcgtgccgcgcagcttgcgcacgaggcggaggaccatgcccgcgaccgtcagcatgtcaaaggcaagctgaccgcccgcgaacggctcgatctgctgctcgataccggcactttcgaggaaatcggcagattctgcggcggcgacatcaacggaggtcaggcgggtgccgccgtcatcaccggcttcggcgagatccacggccgcaaagtggccgtctatgcgcaggacttctccgtcaagggcggcacattgggcgtggccgaaggtcgtaagatctgccggctgatggatcaggcactgaatctcaaggtgccgatcatcgcattgatcgattccggcggcgcgcgcatccaggagggcgtggccgcgctcacgcagtacggtcacctgttcacgaagacctgcgaggcaagcggattcgtaccacagctttcgctgattctcggtccgtgcgccggtggtgccgtgtactgcccggcgttgaccgatctgatcatcatgactcgcgagaactccaacatgttcgtcaccggtccggatgtggtcaaggcggccaccggcgaggtgatcagcatggaggatctgggtggcggccatgtgcacaacaccacctccggcgtggcccactatctgggcgaggatgaggccgatgcaatcgactatgcgcgcacggtgctcgcctacctgccgtcgaactccgatctcacgccgccgacctacgcgtatgtggcgaccagggccgaccgggacgtagccagaaggcttgccgacgtcgtaccggaaaacgaccggcagccctacgacgtgctcgatgtgatccgttgcgtcgtggactatggcgaattcgtgcaggtgcatgagctgttcgcctgttccgcagtggtcggcttcgcctgcatcgacgggcatccggtgggaatcgtggccaaccagccgaatgtcaatgcgggcatcctcgatgtggactcctccgaaaaggtggcgcgattcgtgcgtctatgcgatgcgttcaacctgccggtcatcacgttcgtggatacacccggctacaagccgggtgcgcagcaggagcatgcaggcatcatccgccgtggtgcgaaagtgatctatgcctacgccaatgcgcaggtgccgctcgtcaccgtgattctgcgcaaggccttcggcggcgcctacatcgtgatgggttccaagtcgattggcgcggatctcaactatgcatggccgtccagccagatcgcagtgctcggtgccaccggtgcggtgaacatcatccatcgcaaagacctgcagaaagccaaggattccggcaaggacgtggaggcgctcagggccaaatacacggccgagtacgaacgcaccaccgtcaatgcgaacctgtcgctggaaatgggcgagatcgacgcgatgatcgatcccgagcagacccgcgaaaccatcgtcgacgcgttgcgactgctcgccagcaagaagcgcgcccgcaaaaccaccaagcatcacggcaatcagccactctgacccctgtaacgctgcccctggtaggggagcatcaacgaagtttttgcaatagaagtaaggaacatcatgaacgccttttttctcgatcgactgaacagcgagccgcacgcgctcgccttcgccggccagtccacgccgtggcccgtggcgcttgccgaccagagcaccaatccggtgctcgacggtgagctgcacgctcatgccgctgcggcacaggccctgctctacccggtggccgcggacctgctggccaccacgggacgtccggtcgacctgttcggcttcgaggcgaatccggcccgtcttggcgacgccgcatccgcggcggccagcgttccgggcattgcgctcacccagttgggtgcgctgatcgacgccgccgaactcggctacaatccggccaaggccaagccgatcgccgtgcttggccactctcagggcgtgcttgccgtacatatggttcaggccatcgaacaggccggttccatcgcggcggccaccgcgcagatcgatgagattcttgcgatcgctacgctgatcggtgttgccggaacccgccaggcccgccagttggggcttgccgcccgtcatggcgaggcgactccgatgctgtcggtcaaggacatcacccgtgcccaagtggatgcgctgatcgcacgtgtttccggcgtgcacggtccgatcgccgtggccgtggccaattccgccacgcattacgtactgtcgggctatcccgaagatcttgccgcattcggcgtggaggtcgccaaggagcataggcgtcaggccaagctgcgtgaggagaaggtgcgcggcggccgtgtgttcgatccggtgctcgaatatcttgacgtgaccctgccattccacagcccgctgatggccgaagctgtttcacagactgtttcatgggcgcaatcctgcggcattgatgccgatcatgcccgtgagcttgccgccgaggtgctgttcaaccatgtggattgggccgcccgtgtgagcgccctgatgaagtccaccgatccgagtgccttgtgggtactggacttcggtcccggcgccaccgtgggcaaactgttctccaccgtggcccaaggtacgggcgtcggtgtggtggaagccttcaccacggccgatcgcggtgcgctgtccaccttggagacctcaccggaacgcacccagaattggacccgttttgcgccgagcgtcatccataccgctgccggcgacaaggtgcgtaccgcgttcaccgagctcaccggcaaggctccggtgttgctcgctggcatgaccccgaccaccgtggaaccggaaatcgtcgccgctgccgccaacgccggctactgggcggaactcgcaggcggcggccaggtgaccgccagtgtgttcgaccgccatgtggccaaactcgaggaggagctcgaggaaggtcgcaccgtcgaattcaacgccatgttcatggaccgctatctgtggaacctgcagttcggttcccagcgcatcgtgccgaagaagcgtgccagcggcacccccatcgacggcgtggtcatctccgccggcattccggaattcgatgaagccgtggaactcatccacagcctcaatgccgatggcttcccgtatgtgagcttcaagccgggcaccatcgaccagattcgtcaggtcgtacgcatcgccaaggctgtggcccccaccaaggtgctgatcgaagtcgaaggcggctccgccggcgggcatcattcctgggagtcccttgacgatctgctgctgagcacctatgccgaagtgcgtgaacagtccaatctcgtgctcgtggccggtggcggcatcggtacgccggaacgtggcgccgactacatcaccggtgaatggtccaccgaatacggtcgtccgctcatgccggtggacggcgtgcttgtcggcaccgccgtcatgaccgccaaagaggcccacaccagtgcggaagtcaagcggatgctcgtcaatactccgggcatcgacgccaagggagccgccggcgatccgttcgccccgctgggtgagcagtgggtgccgagcggccaggccttgggcggggtgacctccggactgagccacctgcatgccgacatctacgagctggagaactcctccgctcgctgcggccgtctgttggtgcgcgtcatgaagcatcccgaggagctggaaagccgtcgcgaagagatcatcgaagcgctgaacgccaccgccaagccgtatttcggtgatttgaaaaccatgacctaccttcagtgggcccagcgtttcgccgacctttccttcccatgggccgacgagacctacgccgaccgtttcctgcacctgctgcaacgcatcgaagcgcgcgtcaccgagcaggaaagcggtgagttcacgtcgctgttcgcctcccgcgccgacgtgcaggccgatccgcacgccgccatcgccaagctgggcgaagcctatccgcaggccgatgagctgaccgtcaccccgatggacgaggcctggttcccgaccttggtgcgcgagtatcccaagcccatgccgttcgtgccggtcatcgacaacgatctgttgcgttggtggggtcaggaccaactatggcagtcggaggacccccgctactccgccgattcggtgcgtatcattccgggtccgatctccgttgccggcatcaccaccgtcgacgagccggtggccgacatcctcggccggttcgaatcggccatggtgcagcgtgtcgccgcgcatgacgttgcgaaagacctgagtgccttcgcgcagctgggtgccgcgacttgcgccgaggagttcatccgcaagtcgccgaacatctcctgggtcggccatcttatggccaatccggcgtacggcaccgataacggcgacgccgattatgaaatccgtaaggtcggcacgaacggcgacgtcgaacagtacgatctcgacatccacctcgacacctactgggacaacgatccggacggcggcgcctccaagcatgccgtgcgtgacatcgtgatcccgctcaacgtcaacggcaccgaagccggtctgttcccggtcgtggaccgcgaccgcctgccggaacatgtgtatcgcatgctcgccgacaccgcaggcatcggcaacatcgccatcaccggcgacaagctcaccgccatgccgacgatcgaacgaatggaagacgccgccgaccgtccgttcggcgaagcgcacacgcagtatacgttgtcggccaacctcggcttcgaccatgaagcggccaccggtggtgcgctgccgaacgaccttgtgccgtcccgcatcgcccccgatgcgcttgtcgggccggcatggccggccatctatgcggccctcggttccgtatatgtcaagggcttcccggtcatcgaaggcctgctcaacgccgtgcatctcgaccatcttgtggaactcgaggtgaacgaggacgaactcctcgaacacaccggcgaaacgatcgccctcaccagctgggccgaagactacttcgagtccgcttccggacgtgtcgtgaccatccacgtcacccacaccgccgaagacggcaccctgctggccaatgaaaccgagcgtttcgccatccgcggccgcgcatactccgacgcattgccgccggaagcgccggattacggcgggctcgatgccgaaatcgaaagcaccccgcgtcgtctgctacgccgtgtcacggtgaccgccccgcacgagatgaccgccttcgcgcgcacctccggcgacttcaatccgattcacacctcccatcgcggcgccgcagtctccggcttgacggccccgctggtacacggcatgtggctgtccgcgaccgcgcagtacgcggtgcaggcgctcgacgacaagggcgcacattatgagatcgccggctggacctacaacatgtacggcatggtgcagcttgacgacgaagtggaaatctccattgagcgtgtgggtcgtgtggcccactcaggcatggtgctggaagtgaccagccgcatcgacggcaacatcgtctcccgcgcgaccgccatcgtgcgcgcgccgaagtccgccttcgtctaccccggtcagggcatccagaagcagggcatggtgctcgatgagcgtgccaagtccgctgccgcccgcgacgtatgggagcgtgcggacaagctcacccgcagcaggctcggcttctcgattctcgccgtcgtacgcgataatccgaaggagctgaccgccaacggcgtaacctaccgtcatccggaaggtctgctcaaccttacccagttcacgcaggtggcgctcgccaccgtggcctttgcccagaccgcgcgtctgcgcgaagccggtgccgatatctggccggcctatttcgccggtcattcgctgggcgaatacaatgcgctgagctcctttgcgaacgtgatcccgctggaaaccgtgcttgagctcgtgttccaccgtggttccaccatgcaccatctcattcctcgcgatgagaagggccgttccaactaccgcatgggtgcgcttcgcccgaatcagttcggcgtgggcgacgacggcgtgcgtgagtacgtcgagtccatcgcgaaggcctcgggtgagttccttgagatcgtgaactacaaccttgccggacagcagtatgccgtggccggcaccatcgcgggcttgaaggcgctgcaggccgatgccgcccgccgcgtcgccgaatgtggaggcaagccggcgttcatgctggtgccgggcatcgacgtgccgttccattccacgctgttgcgcaagggcgtgccggaattccgcgacaagctcgacgcattgctgccggcgcacatcgactatcgcggccgcttggtcggtcgctatatcccgaatctggtggctgccccgttcgcgatgacgaaggaattcgcggccaggattctcgaggttgtaccatccgaacggatcaaggccgcgctcgacgatccgcaggtgtgggattcctacgccgaggacgatcagaagctcggccgactgctgctcaccgagctgctgtcgtggcagttcgcttcgccggtacgttggatcgagacgcaggccctgctgttctcttccgtggagcagggcggttgcggtatcgaggaatatgttgaggtcggtctcggcaatgccccgacgcttgccaatcttggtgccaagaccctgcgactgccgcagttctcgggtcgtgacgtgaccgtctataacgtcggtcgcgatgagggccgcgtatatatgaccgattccgattcgctcgttgcgcaggatgatgccgacgattccgccgttgccgagatgtccacacagacggtcgtacagacggccgcgcaggctgccactcaggatgcttccccggctcagcctgccgccgccacacctgcatcggttgcagccgctccgtcggctcccgccggtgccccgtccggtgcgaacgtcgccgacatgccgttcaaggcggccgacgccatcgccatgttgctggcctattccgccaaggtgcgcccggaccaaatcggcgattccgataccaccgacaccctgaccaatggcgtttcctctcgccgtaaccagttgctcatggacatcagctccgaactgggagtggcttcggtcgacggtgccgccgaggcgacagtcaaggcgctgagcgctctggtgaacaaagtggcgccgaactataaggctttcgggccggtacttgccgacatcgtacgcgatcgtgtccgtggcctgttcggcgcggccggtgtgaagctcggtcagatcaccaagcgtgtgaccgacacctggcaactcggcgaaggatgggccagccatgtggtggccgctctcgtgcttgagacccgcgagggtgccagttcgcgcggcggtgatcttgcctcgctgacggccgccgcggcttccaatgccgccgaggccaatgcgctgatcgatgcggccgtgcagaaggtcgcctccgacaggggtgtggctgtgtccatgccgagcgccggtggtgcgtccggtggcgcagtggtcgattccgcggctctggacgcattcgcggccaaggtgaccggtgccgacggcgtgctcgcctccaccgccagattcgtgttggaccagctgggtgttgccgcgccggtggccgacgaaccagctgatgagggttcggccgtggtcgccgccgtcgaagccgagcttggctccgactggccgaagcaggtcgaaccacggttcgatgcccgcaaggccatactgttcgatgaccgttgggcctccgcacgtgaggacctcgcccgtgcctactacgacaacgacgcttccattctggacggcggtttcgtcgggcttggcaaggccattgccgccgaagccgattggtatgcggacaggatcgcgtccgagggggagaccacgcggtccgccctcgccacggccttccggcatgtggtcatcgaagcgctcaacggtatctccgatgacgcttccgccagcaggttcgcaggcgatgtcgccgtcgtgaccggtgtggctccgaactccatcgccgctcaggtcgtcaacggcctgcttgccggtggcgcgaccgtcgtcgccacttcgcacagtttcaagccgagcgtgaaggcgtgggccaagcagacctatcgtgaacatgccgcaggcgacgccaggctgtggctggtgccggcgaacctctccagctaccgcgatgtggacgcgctcgtgcagtgggtcggcaacgtgcagaagaagacttccggcgcaaccaccaccatcctcaagcctgcctacgagccgagcctgttcttcccgttcgccgcgccgccggtgcatggcactttggctgactccggcgagttgttcgaatcccaggcccgcctcatgctgtggggcgtggaacgtgcgattgccggtcttgccaagatcggcgccgacaccgacgtgcagcacaagctgcatgtgattctgccgggttcgccgaaccgtggcatcttcggcggcgacggcgcgtacggtgaggtgaagagttcgttcgatgcgatcgtgaaccgtgcccgtgccgaaaaggcgtggtccggccgggtcacattcgcccatccgaagatcggttgggtacgcggcaccggtctgatgggtggcaacgatccgttggtcgcagtggtggaacgtcacggtctgaagacctattcgaccgccgagatcgcggtgaaactgctcgatctggccactcgcgaatctcgtgaggaagccgtcagggctccgctcgacgtggatctgaccggcggcctgggtgccgaaccgatcgacatcagggcgcttcgtgccgaagccatggccgatgccgaggccaaggccgccgagcagatcggatcgcaggatgcagacggttccacgcctgagggagccatgctgatcaaggcgctgccttccccgcgtgccccgcgccaggcggcggtcgatctgaaggattggcagaacgtcaccgcacgtccggaagacgaaatcgtcatcgtttccgtgggtgaactgggcccgtggggctccggccgcacccgcttcgaagccgaactcggcatccatgccgacgggcgggtcgatctgtccgcgggagcggtgctcgaactcgcttggaacatgggtctgctgacttggaacgacagtccgaaaccaggttggtacgatgccgacggcaacctggttcccgaagaggacatcgccgaacgctaccacgacgaagtcgtggcccgttccggcatccgtccgttcgacgaaggcatgggcggcgattatcagggcggtaccgacgaggaggaggccgaagtcttcctcgatcacgatgtgaccttcgcagtgccgacccgccagatcgccgaagagtacgtcaagctcgacgaagcccacacttccatcgcagccgatgccgagtcgggcgaatggaacgtgacccgtcatgccggctccatgattcgcgtgccgcggcgcgcagccatgacccgtacggtcggcggccagttcccgaagggcttcgatccggtcaagtggggcattccggcctccatggtcggcgacgtcgacaagatcgccctgtggaacatcgtcaccaccgtcgacgcctacctgtccgccggcttcacgccgacggagattctcgaagccgtacacccgtccatggtggcctccacgcagggtaccgggttcggcggcatggcctccatgaggaagctctatctggatcgtttcctcaaccatgagattccgaccgacatcctgcaggaagccctgccgaacgtcgttgcggcacacgtgatgcagtcctacatcggtggctacggcaatatgatccagccggtctccgcctgcgccaccgccgccgtctccttggaggagggcgccgacaagatcgccctcggcaaggccgacttcgtggtcaccggcgcaatcgacgacatcggtgtggaatccgtgattggattcggcaacatgaacgccaccgccaattcagaggaaatgtacgccaagggcatcgacgcgcgcttcttctcgcgcgccaacgaccgtcgtcgcggcggcttcgtggaatcccagggcggcggcaccatcctgctgacccgtggcgacgtcgcgttgaagctgggcctgccggtcgccggcgtaatcggattcgtgcactcctatgcggacggcgcgcacacgtccatcccggctccgggactgggagcgcttgctgccggcatgggtggcaaggattccaagctggtgcacgatttggccagactcggcgtgaccccggacgacatcgccgtggtctccaagcatgacacgtccaccaacgccaacgatccgaacgagtccgagctgcataacacactggctcatgccatcggccgtacggacggcaatccgttgttcgtgatttcgcagaagtcgctcaccggccatgccaagggcggtgcctgcatcttccaggtcaacgggctgacgcagctgttcaagtccggcgtggttccggcgaatgcggcgctcgactgcgtcgatccgaagctcgagcgcgacgatcacatggtctggctgagggaaccattgaagatcggtgccgtcaaggcgggtctcgccacttcgctgggcttcggccacgtgtccggcttcgccgcaatcgtgaatccgggcgccttcgaagcctccgtggcgtacaccgcaggtcgtgaggccctgaagacatggcgtgagcgcgccaacgcacgtctggccgccggtcagcgccgcctcgaggaaggcatgatgggtcgtgccgcgctctatgagccgatcgacaaccgtcgcttccatgaggacggccgcggttacgacgcccacgaggtcgaaaaggccatgcttctcgacccgaacgcccgtctgggagcatccggctacttcgaggcgtgaaggtcgggctggcttgcacaggcaggccagccgtcctgtcgaaatgattgacgaaagccgccgtcggcgggtcgtccgagccgcattgcggtaccgtgacgacccgccgacggcgggttgccgtattgcgtagggaatctcccattggttcggcgattgggggttcctacgattgatgtgcgcaggcagcggtcgtcggaacgttgcggttgaggtatgaaagggatcgttcaatgctgggcttgggacatgacgtggttgacgtgggcgcgttcggcgaacagttgggcttgtccggctcgcgcatgcgcggattgttctccgcgcgcgaactacgccaggcggcgcaacgtgcgaaggccaagaacgacggtgagacggtgcatctcgccgtccgctgggccggtaaggaggctttcctcaaggcttggtgcgaggcgttggctttcgtggcggaacgtgatgccgccactcccgcacgcccctacaccattgacgctttcccttggccggacatcgaaatccttgacgattcgcatggcgtgccccatgtctgcctgcccccggaagtgcggtgcaagttgcgggaatccctgggatcgccgcaatgctatgcgatacacatctccttgagtcatgacggagccatcgcatcggcggtggcgtatatcactgccgacagggggtgatgggtggccatcaaacgtttgagagtaagtgagagcacgcgtcgaaccggtttggtaaacgcaatgagccgcgctacactgagtggcaacgcagcaacgggagctgcgtaaagactcacaacaacgaagtttcccaaaggagtccgcccatggccgcacgttccaagtccgacgaagcattcgcaaatcgtctcgcgcaacatggcgaggagctgaaggaactgttcacgagcctgtatggcgatgccgaagcgttggaaagcctgcgagagctcatgaatgaggcccatgcggcccgaccggccgatctgaagcgtctcgacaccaaacgcgtggccgatccggaatggtacaagcgcggcaacatgttcggcatgaccatgtataccgacctgttcgccggagatcttaagaatctcgccgagaaggtgccttatctcaaggagcagaagcttacctacctgcatctgatgccgctgctgaaaatgccgcatccgcagaacgacggcggctatgcggtggaggatttcgattcggtcgacccgagcctgggcaccaacgaggatctggctgcgctcaccaagaagctacgccgcgccggcatcagcctgtgcctcgacttcgtgatgaaccataccgcatccagccatcgctgggccaaggccgcacaggcgggcgaccccgaatatcagggctattactattgctacgacgaccgcaccgtccccgatcagtatgacgccgtcgtaccggaggtcttcccggccaccgcacccggcaacttcacatggaacgaagacatgcacaagtgggtgctcacatcgttctatccgttccagtgggacctgaactaccgcaatccgaaggtgttcatcgccgtgatgaaaagcgtgctgggactcgcgaacctcggtgtcgaggtatttcgcatcgacgccgtgccgtacatctggaaggagcttggcaccaactgccgcaatctgccacaggtgcacaccatcgtgcgcatgctgcgcatcgtgctcgaatgcgtctgcccggcagtggtgctcaagggcgaggtggtgatggccccgaaggaactcgccgcctatttcggcactcccgaacatcccgaatgccacatgctgtacaacgtgtccatcatggtgaatctgtggagcgcactcgccagcggtgacgtgcgcctgctgaaggaccagctcgacaagctcgacgcgttgccggggaactgctggttcgtgaactatctgcgttgccatgacgatgtcggctggggcctcgacgagccggaggagcttcgccttggcatcgatccgctgaagcataaggagtttctgtatcacttctatgagggttccgtacccggcagttgggccatgggcgagctgtacaactacgacgaggcgtcgaaggatgcgcgcagctgcggcaccacggccagcatgtgcggcgtggaacgtgcgctgatcacgcacgacaggccgttgttggacatttcgatgaaacgcgatctgatgatgcattcggccatggcgttcctgcgaggcttcccgatgctgagttgcggcgacgagatcgtgcagctcaacggttgggaatacaaggaggatccggatcgcgtcgaggactcccgtaatctgcaccgcagtccgttcaattgggagaatgccgagaagcgcaagcaggccggcaccctgcagaagcggatgtgggacggtctgaagggcattcgcgagatgcgcgacgatccgtgtttcggtccggatgcatgggttacgacgtgggatgcgcacaatgatgccgtattggcgatggtgcgccatgtggaaggacgcacggtgctgggactgttcaacttctcgtccgcacgccagaccgcctaccttgattccgacggcgacatcatgttgcccgccgaggttaccctcgaaccctatcaggtctgtgtggccgaagcatagggcagacaggggagacttgcgattgttgggggagtgtgtataatggctcgagtcgtttcgtgtcggctcgggccgacgcaaggcggtacgcggatgtagctcaatggtagagcctcagtcttccaaactgattacgcgggttcgattcccgtcatccgctccataacgggcttaagagaagaagcaaggcgtgcctgatggcacgccttttgcatacctgccgtgcgattgcgtgacgtgccgggtatgctataactgctgcgagacgacgcgatggtcgcaggaatcgcatgtataaatggagcggaacatggcacaggcgaaaagcaacaaggctgcggaagccgttgacggcgcggttgagacggtcgatgtttccaagcacccgaccgcatccatcgaacggtccgacctgtccttggccgacatcgagcgccgcgaatcgcatccgggccgttgggtactgttcatcgtgctggtgctggcggccatgatcgcgccctactggtggggccgcgccatcgcggtgaaggacgccacctggctggtcgcgcatctgagttttctgaatccccgcggcgtcgcgctgatttcgtggaccgtcaccatcatgacgatggccggcctggggcttatggtcgccgacgcgaagaaatggctgtggggtacgatcttcgtcatcggcctggccgccgaacagttcgtggccggcctgtgtctgctgagcttcaacttctggaatgccacctatgtgatgtacggcaatgcctcggggctggcgaatgccgccaatctcggcatcatcgcggccggcttcggcgtggccgtctatgccgtgctgtgggtggggctgctggtgtgcatcaagaaggaatcgaagctgaacgtattgacgcgtagctgggcctcgttcatcctgtttttcgtgatcgagctggtcgcgctgggcgtggtgctgttcggggggttgctcaccgccgtctgacatcggtccgtccgattccgcggattcgcatcatgatgatttggtccgggcttcgtgtatgattgccatttggcgtgtttcgcccgcggatagagagcgcgccggtattgggccggcagcaccgcgcagcaacataaggaggatgccgtggcacttacggctgaggaaaagcaggaaatcatcaagacttacgctacccacgagggtgacaccggctccccggaggtccaggttgctctgctgaccaagcgcatcgctgatctgaccgagcacctcaaggagcacaagcacgatcaccattcccgtcgtggtctgctgctgatggtcggtgaccgtcgtcgtatgcttgactacctcaagcgcgttgacatcaaccgctaccgctccctgatcgagcgtctgggtctgcgccgatagtataatcttccgcccgagcgtcatacggcgcccgggcgtttttgcatgacagccgcgatgaggaaagacagtatgaaggcccaacggtttggggcgtaagaggtctagaatcaaggattgaggaaagcgacgaaggtaccgtcgcgtcacgcatgttgaaatcggtggacgtccgctgaagaggacaaccgatagttggttaagtaaagtacagaaaaaggaggaaccctatggagggtcccgaaatcaaggctgtagaagccgttatcgataatggttcattcggcaagcgcacgctgcgcttcgagaccggtcgtctcgcccagcaggcggatggtgccgtcgccgcctatcttgatgatgattcgatgattctgtcgaccaccaccgccggttccagcccgaaggagaactacgacttcttcccgctgaccgtcgacgtggaagagaagatgtatgccgccggcaaaatcccgggctcgttcttccgccgtgagggccgcccgagctccgaggccattctcgcctgccgtatcatcgaccgtccgctgcgtccgttgttcccgcacaccctgcgcaatgaggtgcaggtcgtcgaaaccgtactcgccgtcaatccggatgatgcctatgacgtcatcgcgctgaacgcggcttccgcctccaccatgatttccggtctgccgttcgaaggcccggtctccggtgtgcgtctggctctgatcgacggccagtgggtcgccttcccgcgttggagcgagcgtgagcgcgccgtgttcgaaatcgtggtcgccggccgcgtcgtcgagaacggtgacgtcgccatcgccatgatcgaagccggtgccggcaagaacgcctggcacctcatctacgacgaaggccagaccaagccggacgaggaagtcgtcgccggtggtctcgaagccgccaagccgttcatcaaggtgatctgcgaggcccaggccgagctcaagaagatcgccgcgaaggaaaccaaggaattccagctcttcccggagtacaccgaggacctgtacaaccgtatcgacgagatcgcgcacgccgatctcgatgaggctctgtccatcgccgagaagctgccgcgtcaggatcgcatccacgagatcaaggaaggcgtcaaggccaccctcgcggaagagttcaccgacatggacgacgccgagaaggacaaggagatcggcaacgccttcaaggagctgcagcgccagatcgtgcgccgtcgtatcctgacccaggattaccgcatcgacggccgtggcctgcgtgacatccgcaccctgtccgccgaggtggacatcgtgccgcgcgtgcacggttccgccctgttccagcgtggcgagacccagattctgggcgtctccaccctgaacatgctcaagatggagcagcagatcgacgcactgtccggtccgcagtccaagcgttacatgcacaactatgagatgccgccgtattccaccggcgagaccggtcgcgtcggttccccgaagcgccgtgagatcggccatggcgccctcgccgagaaggctctcgtgccggtgctgccgagccgcgaggagttcccgtacgccatccgtcaggtctccgaggccatcggttccaacggttccacctccatgggttccgtgtgcgcctccacgctgtccctgctcgccgcaggcgttccgctgaaggctccggtcgcgggcatcgccatgggcctggtgtccggtgacgtcgacggccagcacatcttcaagaccctgaccgatatcctcggtgccgaagatgccttcggcgacatggacttcaaggtcgccggcacctccgaattcatcaccgccctgcagctcgacaccaagctcgacggcattccggccgacattctggcctctgccttgcagcaggccaaggaagcccgcaccaccatcctcgaggtcatcaacgagtgcatcgacggcccggccgagatgagcccgttcgcgccgcgcatcatcaccaccaccgttccggtcgacaagatcggcgaggtcatcggcccgaagggcaagatgatcaatcagatccaggaagagaccggcgccgagatcgccatcgaggatgacggtaccgtgttcatctcttccgagggcggcgagggtgccgaaaaggccaaggagatcatcgactccatcgccaacccgcacgtgccggaatccggcgagacctacaatggcaaggttgtgaagaccacctccttcggtgccttcgtgaacctgaccccgggtaccgatggcctgctgcacatctcccagatccgcaacctggccaacggcgagcgtatcgacgccgtcgaagacgtgctcaaggaaggcgacaccgttgaggtgatcgtgcagggcgtcgacgaccgtggcaagatcagcctcgccatcccgggcttcgaggatcaggaatcctccgcacctcgccgcgagcatggcgaccgttccgatcgtgatgactgtcgtggcggccgtggccgtcgtgacgatcgccgttccgatcgtgacgaccgtgactacgatgatcgtccgcgtcgtcgtcgttccgatcgtgacgaccgtgattatgatgatcgtccgcgtcgtcgtcgcgaccgtgactatgacgatcgtgacgaccgtgactacgatgatcgtccgcgtcgtcgtcgttccgatcgtgacgatcgcgactacgatcgtgatgaccgtcgttccgaccgtcgcggtggtcgtggccgccgtgatgaccgcaatccgcgttacgccgccgacgagaactacgacgagtaccgcgccgatcgcgaagagcgttccgaacgcccgcgtcgccgcattcgtcgcgacttcgatcccttcgaggactgatggcgaaggctgatagctagaggcttcatcgcaacgaacgcgtggagggccgccctgactgattcggggcggccctccacgcgttcgtcattgcgtggcaatcatggtgccgccctgcatatcggagtcggatgccatttgggatgaaataggcaagatagtacaatgtgtagggtctatgcgaagatagtcaaggaaataataagctaaaggtaaggattggcgatgaatattggcattattatcgcggtcgtcgtaattgttcttattgtgctgtgggccatttccgcttataacggcttggttaccttgcgtaaccgcgtcaagaacggttgggctcagatcgacgtgcaattgaagcagcgtgcggatctcatcccgaaccttgtcgaaaccgtcaagggctatgccagccacgagtccgaggtgttcacccaggtgacccaagcccgcgcgggtgtggtgcaggcggctcagtccggcgacgtggcacagcgcattcaggccgaaaatcagctcagccgcgcactggtcaacctgcaggccaccgccgaggcatatccggagctgaaggccaacgaaaacttcatggatctgcagtcccagctcaagtccctcgaagagaagatcgcctacgcccgtcagttctacaacgatgtggtgcagaagtacaacacccggatcgaagtcgtgccgacgaacatcatcgccggtctgttccacttcgagcaggcgacgtacttccaagtcgacgaagccgatcgccagacgcctcaggtcaagttctgaccgataccccctaagcctcatccgcaatgtggatgaggcttttgcgtccgtccggtttttcacggcttcacacggaaaggagtgccgatgaagttcagacacatgcttaccagcgccatcaccgccataatcgtcagcgtaatagtggtgggtggcatcatcgtggtcttcgaggccaacggcgacgagcccgatatgagctacaaaacgcttgatctggatgcgcagattacggccgacggcgatttgaagatcacgcagcatatcgatgtgacgcttcgcgatcgcagcgatgacgactacgaacgtccatggaagcagctgtaccagcagtatgatctttccgaagatgcgatcaccaacatcaccgacatcagcgtatccgacccgttcacaggcaaggaatatccgcagggaagcattgccattccgagcaactattccaagctggaatggaacgaacagcatgccgggcagtggtatatcgccgacgtgacccagggtgattccaatccgcaaccctatgacccgcagacgcaagggttcacggcgaagcattccaacggtaatggcgaatcgactacggcccgggtggaacgggagttgaaatccgattccgccgccacttccgcccagcatcgtaccgtggaaatcggctggaacattccctcgatttcgtcggccagcggtctgaagttcgatgtcagcatgaccttcaagaatgcggttacgaaatacaaggacgtcaccgccatgcagtgggagccgttcggcaagaagaaccggattccgatcggtaaagtgaccggtacgctcaccttccccgatggcgccaccagcaagaacacgtggggttggctgcacgtcacgcgtgcgaattcgaccgatcgcggcaagaatggttcgctcgtgttctccgccgatgacatacgatcgggcgattatcttgacatcgtggccatgttcgattccacgttggccggcaatgtggcgcgcacgtcgggcaaggacgccaagagcacgttcatgaatatcgaaacgcaggacgagaaggaatggcgtgatgaacaacgtcactccgccagaatgcgcgtattgagctgggtggtcacgggcgcgctcggcatcatattgtgcatactgggcatgatcggcgccattcgcagcatcagggcatcgcaataccatggtggcatcgagtattggcgtgacccgccggacatgtctccggccagcgcggccaagctgatgggggtgttggccggaccgtccggacttggcgggagggactcgagcattcgtaaccgccagatgagttcgaccgtcatgtcgttggcctcaaagggggcaatcgccatctatcccggacctgcggagctgtatgtcggttatgacatgtccgctaccagcgcaacgacgttggcggcgatgatcgcttcgaacggcaaggaatcggagctgcgcaagtccagcaccgtggtgattttgccggtggtctacgacaatgtcgaatcattgaatctcagccaatccgagcgggccgcactggacattctggtcaaggccgcagcgctgaccggcagcagggtctacgatttcaaggccatgaagagcgcattggggaagtacagcaaggcctacaaactgcaggaagccttcgacagagcctgcgacaaggaattcggcaggcttggtgccacgcagagcaccggttacggtgcgcgtatgtgcggcgtgtttggcgttctgctcagtcttgtcatgacggtcaggttcgtcagttcgggaagcgagttggcgttggcgctcgtggaatgcctgccgatcatggtggtgtcgatattcatcatcaagatcacgcgttccaccgccatcaccgaggcggggcagcagtatgccggtcaggtgcaggggttgaagaactacctggaggatttcagcgatttcaccgaccgcaacgtactcgacctgaccctgtggggtcgttacatggtatatgcgacggcgttcggcatttccgcgaaggccgccgcgcagttggccaaggcctaccctgaggtgaccgatccggaatggttggatcagaacgccgcgtcctcgtacctgtactggccgtgccgttcgtattcactcacgtcgggttccgctttcgcttcggcggccggatcgttcgatgcatcggcgttcagcgcgaattatggcgatttcggagcgcagctgaattccagcttctccgacattcgctccaccatggccgcgactgcgccgtcatcatccagcggtggttccggtggcggcttctccggtggttccggtggcggcttcggcggttcgtccggtggcggtggcggcggctcgttcggcggacgctgatcggccactgagaccgcgtatggaaagcctacctttcgcctagggcgattggtaggctttgctgttggagggcatggatttccgtagaaatccatgctggtaagacaaggcttctttgaaggagaagacatgaccctgttccgcaatctcggaccgttccgcaccactgccatcggtcacggtgaaatgccgctgaccatcgaaaacaaccgtggccatgacatcggcatcgaaacgctgcacgcctcactggacgcaggctgccgccatatcgacaccgcttgggcctactacactccgggtgaggaggaacagaccggtgaaaagctggtgcgtgaggccctggaaacctggcatggcccgcgcgacgaggtcaccgtggccaccaaggtcggtcttcgtcgtgcgtgggagggcgacaagccggtgtggccgcgcgatggcaagccggagcatctcatcgcatacggcaagcagtccgcgcaggcgctcggcgtcgattcgattgacttgctgtacctgcaccgtcatgatccggaagtgccgtacaacgaatcctgcgaaggcatcaaggcattgctcgatcagggtgtggcccagtgggcgggcgtttccaacgtgagcatcgagcagttgaagatcgcgcaggagattctcggcgacaagctcgtagccgtgcagaaccagtattccccgattcacctggagacgcaggatacgctggactactgcgccgaggccggcctggcgttcgtatgctggagcccgctcggcgggtatcgccatccgtatgatgagcacctgttcgacccgttccgtgaggtagcggccaagcatgacgtgagctaccagcaggtagtgctcgcttgggagcttgccaagggtgatcatatgttcgtgattccgggagcgcaccgccccgaaaccattctcgactccctgaaggccgatgagcttgagctcaccgatgaggagcttgccttcctcggctgagcgtctccgtcgatctgccttttgacgtctttcgcagccgtaatcagcatggttgcggtacgggtttgcggcgccaaagacggcaaaaggcagcgggcttacaggatggcgatggcaaagtccgcgaggagcttgatgccgtagagcatcaccacggcaccgcacgcccggttcatgaagccgatgaccttcgggctgaacttatggctgaacactgaaatcagcagcgtaagcccgatgaaccatagtgcggaagcgatttccacgcccgtgatgaacggcgtggactgcgacatggtgagcgtggcgctgaaggcgccgagcatcagcgtgccgtcgatgatggcctgcgggttgagccatgtcaccacaccggcggtgatgatggtgctcagcagttcgttatcgccgccgaagcgtgacgccacctgatgcgccgtattacgggactgagcgatattgtcggaagactggccatgctttctggcgaacagcaatcccgcaccgatatggagcacgaccagcccgccgacggccagaacacccaggcgcagcaggtcgtaacgttgcatcagcttgccgatgccgaagaagcatgacaacgacagcgaaacatcaaagaccaatacgatcagggcggtcagcaacgcacgtcggcgcggcttggtcagcgccgaattgatgacgaacagattctgcatgccgatcggtgcggtatacgccaatcccagcgtgagaccctgcaaaaacaatcccataacaacctcagcattctcacccaaaaacgtttggctggttttccttcatccaaccaatctcagccaaatcgtcatcgcataaaaagggtgtttcatccttatatcgcaaagatatgcgcttaaactagtgattatcttagaggcataattacagtagacaaccagccaaagtcttgaagttggtccaaccaagcgaccaacttggccgaatcgaccgcaaggagggtcatggcacgtgtcgccccactgaacatcgactggaagccgagtcgtgaatccgacaggcccatcaccgagcagatcgtcgactacatgtgcgaacaggtgtcgagcggcaactgggccatcggttcgaggcttccgtcgcagcgtgccctggccgaatggttcggcgtgaaccgttccaccatcatcgcggccatcaacgaactgtcggattacggcatcgtcgaagggcagcatggcgcgggcacgagaatcgtcagcaatacgtggtcgctgatgctgccaggcgcgccggactgggccgattatgtgggctccggctttttcagggcgaacaacgccaccatccaagccatcaaccgctacgaattcgtgccgaacatgacccgcatcggcaccggcgaactcgacccacggctttttcccaaagccatgtggaagcaggtgctcggcgaggcggcgaacgagatcgattcgctcggctacccgccgccggaaggactgcccgcattgcgtgaggcaatcgccgcacacatgtgcgccacgggcatcgaatgcacgacggcgcaggtgctggtgacgagcggcgcattgcaggcgttgcagatgatctccatgagcctgctgccggcgaactccatcgtctatgcggaatcgccgagctacgtcaagtcgttgcagatcttccaatcggccggcatgcgcctgaaaggcgtgccgatggatgccgacggcttggatgtggccgcgttgcagcggctgttgctggggcaggagaccgtaacgtcatcatccggcctgccatccgaccatctgccgtcggccacaacgaggaagcatgcggagaacgccattctgtacacgattccgaccaatcataatccgacaagcatcaccatgagcgagcggcggcggcatgaactgatcgcatgttgcgtggccaaccgtctgccgatcatcgaggacggtgcctaccgcgacctggtattcgacggtgaagcgccactgccgttgaaggcgcttgacgagaccggcatggtgattacgctcggcagtgcgtcgaaggcgctgtctccgggactgcgcatcggttggatcgtggcgaacgagccgatcgtgcaacgcctcgccgacgtgaagatgcagatggactacggcgcgagcgtcctgagccagtggacgttcacccgcttcctgagttccggtctgtacgacgaatacgttgcgggattgaagatcgagcttcgtcggcggcgtgaccgcgcattggagacgttgcgcaagacgatgtcgggacttgcgcattggaccacgccgcacggtggcttctacatctggctcaccttcgaccgttcgatgcgcatgaatcgcctgttccaggagaccgcggaacgcggcgtactgcttaatccgggtgacatctacgatttcgcagccgacaattccctgcgcctgagctactcctacaccacgccggaggagttcgccgccgccgtggacgtactggcggcggtcgcccgtgagttgggatgagccgatatgacgcgattttccggttgattgacgcatttgcgggtgttgccgcaagggaatccatggcgtaatgggccttgtagccatacaagagaggagaacgtcatggctggtcttaacaaggaaatcaatttgccacgcggcgtcgcgctggcggtcggtatggtgcttggctcgggcatgctgggcctgcccggtatcgtggttgccgcggtcggatcccggatggcgatcgccagctggcttgccgtcatcctggccatggttccgatggtcgctattttcagcagactcggcagtcgctacactacggccgccgggcttaccgagtacgctcgcatcgctttcggcccttgggccgcggatgcgacctccgttcttttgtggggaacgtatgcgattggcattccggcactggcatgggtcggcggcgcctacgtgtgcagcctgttcgatattgcgcaatatccatggggactcgtatgcgcgttgatgattctgctggcgtccaccatcgtcaatctgcttggtacacgcctgacggcattgatcaacaccatctcgctgtggatgattgcggcactgatctgcatattggtcggcacgcatcttgatttgctggtcctcggcatccgcgagctgccgtcgatcacgaccggattcgacctgtccggcctgatttccggagcgggtctgatcgtctgggcgtttctcggctgggagaacatgtccttcagcgcggaggagtttcgcaaccccaaacgcaacattccaatgacctattggatcagtttcgcagtggtatccgcgctgtatttggcgctggcgttcgtggtcaacggtgctgaaatcgccggtacgcacatcacaggcgcttccggcctgacctcgctgctgcccgatgattggaaagccgtgatcacggtgctcatcgtcatcgccattctcgccaacgcgaactcatgggttctgggagcaagccggctcaccttctcggccgggcgcaacggactgcttcccggcatctttacgaagaccaaccgcaatggcgtgcccgtcaatgcgctgatcgccatgcaggtcatctatacgggcgttatcgtcatcgccgggcttctgcatctcaaggccgataacctggtgggcatcgtcagccaggatttcatcgtgctgtacgtcgtgtccatcatcgcattcatcatcagcgagcggaacgaaggcggggtgtcaggtgcctcctggttgatcgcattgctgtcgctggtcctatgcggcattatcctgaccggcttcacatggtggatcctgcatccgacgatgctggtggcggtgggtgccgcggttcatcgtcgccgcatgcgacggagaaaatgacgatgggccgtcggaaggcttaagaacaaggcgttttcggggctattgacggagtgtgccgtttggtgggtttcctgaggaatccgccaaacggctccgttcgcttcggagttggaattggtggggcgtcatgccgaaaagccggagaaaatgacgtctcataaggtcggtatccgaaaaaccgacggcatgggcaatcgaatcgatgcgcatggtcgtggatatgagaagagactgcgccataagaagtcgttcgcgcaatatccattgatggggagtggttccccattccttgaattttcgttccaaggtccttacggacattcccaatgccgcggcgaggtcgcctgctttccatggatgctccggatgcgcgaggaacagcatgcgtaggtggtccagatcgctgtcgaaccggtgttgtgacgaagaggtggcatcggcgatctggatatggcttccgctgcgttccagcgtcaccgccatctgtttggataccgattcggcgatcgcgtcgccgagtagttgacgggtgatgctgagacatgcatccgttcccgcactggcgcctgcggaggtccagatgttgtcttgctgtacgtacaggacattgtgcctcacattgattgcggggtactgctcgccgagttgttcgcagtactgccagtgggtggtggcgatcctaccgtcaagcatgccacaggacgccagccagaaggctccggtgcatagcgagaccaatgtggttccctggctgtgcgcatgctgaaggagcgtgatttcctgctctctcgcttgggggaccgtgccgatttcgaatgaggaaaaccccggaatcaccagaatcgagcaacaacggcaggcctcatcgaatgcacatatgggttgggatccggttatgcaaccggattccatgggcacgatgaagaccttgccgttctcgttcagcgccaaggaaaacacttcaagggcggaggccatgtcgaaaggcctggtacgtcgccacataagaattcccacattcatggaacgaacgttacggttccggggtacggcgttggtgccgttcccttttcgggtatgtaaaatctccgaccggaatcgagtccacgcttcgacccgtcatttctgcgatccgcatggcgtttgccgcctgtcccgtgaatctacgagaatgacagatggtctgaatcgaaagaaaaccgcgtaggcggcgagtaagaggaacattcgtgcaaagaagaaacaagcctgaggtattggctccggcgggcaacctgcgaggactcaaaacggccgtcgactatggtgcggacgccgtctactgcggcggcaaggcgttcggcatgcgaagcgcaccgaagaatctgagccttgaggatttcgaagaaggcgcgcgctatgcacatgaacgtggcgcccgcgtctacgtgaccttcaacgtgctgccgcgcaacaacgaggtcgaggcgatgcgcgaatatctcggccagctgaaagacaccggcgtggacgcgctgatcgtctccgacatcggcgtgatgctcatggccaaacacatcgcgccgaacctcgaactgcatgtgagcacgcaggccggcgtgaccaactatcaggccgcgaacgccttttacgagctgggtgcgcgccgagtggtactggcccgtgaaatggacttgcaggccgtgcgcgacatccgtgcacgcatccccgacgacctcgacatcgaatgcttcgtgcacggtgccatgtgcatggcgttttccggccgctgcctgttctccaactatctgaccggccgcgacggcaatcatggcgaatgcgcgcagccatgccgctggaagtattcgatcgtggaggagaaacgccccggccagtactttccgatcgaacagaccgaagagggcgcgtacctgttcaactcgcaggacatgaacatgctcgcccatatcgacgatctcatcgactccggcgcgacgagcctcaaaatcgaaggccgctccaagagcgcgtattacatcgccgcaatgacgaacgcctacaagacggcagtcaacgaatacatggtgcaacgcggcttcgaggatacggacggcaacaggctggaacccttccgcgatcgcgtgatccgcccctcggatccggagtacggcaagccggaaatcaacgatgcgatcatgcgcaatgccgacggcgcattcgcgggtaaaccggatatcgataccgttccggtcgccggcaccatcacgaccgagccggaagacctgagctaccacgcgcgcagcacgcgccgcaagtcgaatacggcggccgaagtgctgccggacggctggtatcacgccggcgtgcgcccgacgaggcacatcacgttgccggactggctgctcgacgaacctgacaaggtggcccaccgcgactattccaccggattctactatccggaacacaaggtgcggcagagcaccgaccgttccgcctacttccgcgcatggctcgtcgtcggcgaagtgctctcctggagtccggaagacgacggacgcgtgaccatcatgagccgcaacaagatcgaggcaggccagaacgtcgaattcgtgctgcccggggccgcgcccctcgcctataccgtgcccgcgggaggattccgcgacgccgacggccactgggtggaggccatcaacaatccggcgcacgtcttctccatgccatgcccgcaggaagtgcccgtcaacgccgccatccgctcgcgtacgaaacagccgacgctcaaagccgaataatcggccgaaaaaacggtagtaagcccagcaatcgcaagtaatcaaggaatgtgacatgagcaacgaacagtacgatgacgcgatcctcaattccaacgccatcgaccccaccgacaaagacggcaacccgattccggtgaccatcccgatcatgctggcccccggcatcacggtggtctataccacgcgactcggcggtgccagcgaaggtgacttcgcgcacttcaacctcggcggcaaaaccggagacaacccggaacacgtactcgccaaccgcatggcgctcgccgccacgctcggcgcgaagatcagcctcgtcagccaagtgcattccggcaacgcggtggacgtggacgaggcgttcgtgctgaaccgtccgttcggattcgacgtgtccggtaccaaggccgacaccgcgcgaaccgttgacgacaccgcaggggaaccggccgtaatcgaagccgacggccaagtgacctcccaaaagaacgtggcactcggcatgttcgccgccgactgcctgccggtactcatggcccaccccgaggccggcgtgatcggcgccgcgcactgcggccgccgcggcctgcagcaaggcgtgatcggcgccaccatcggcgcaatggccgccaaaggcgcaaagccggaacgcatcgtcgccacgctcggcccctgcatctgcggcgactgctacgaagtgggcggcgacatcgccgacgaattcgacgcacagttcccgggaatgttcacgctgagccgtttcgggcagccgggcatcgacatcgccgcagccgccctccaggagctcgccaaggcaggcgtgccggccgacaacatcgtctcctcccgcccgcgcgtcaatgcggccacccaatatctgagcgaagacgaggaactcgccatgctctgccagagcgacggcgaaggagaaccgcaactgtcggaacgcttcaggaacatccgccgcagcctgtgcacgctcgagaatccgctatggttctcgcatcgccgtgccgcgctcgccggcaaacggcacgaagggcgcatgctggcgctgatcgtacgcgaatagtcgtcaccgctgttgcggattgcgtgcagaagatgaatggagggcgttgcggcaacgccccttagttttacggtggaatctatgacagagagagaacagaggcaggcgcagtccgcgcccgtagtggccgtggtattggccgccggattcggcacccgtttcgatgaaagcaaccccaagcagctcgtatcggtgggtggcaagccgatcgtatgctggagcatcgaggccttcgagaacaatccacgggtttccgacaccatcgtcgtggtgaatgcgcgggtgaacgacatggtcaacgcgctgatcgacgagaacggctacggcaaggtgagggccatcgtccccggtggcgaggaacgtgtggacagtacgctggcggcgttggatctgctgaagcaggccggaattccggcagatgcgaagatcctgatccatgattccgtacgtccgttcgtggcccagccatccatcgacggctgcatcgacgcgcttgaccgattcgaggcggccaccgtggccttcgcctccactgacaccgtgctgctgaccgaagatctcggcgaccgcaaggtggtgcgcgccgtgcccgaccggccggacaccttccgtgcgcagaccccgcaggccttccgcttcgacaccatcaacaaggcgtacgaactggccgcggccgaccccggcttccatccgaccgacgacacccgagtggtcgtggactatctgcccgatacgccggtcgccatcgtggaagggtccgaaacgaacctcaagatcaccacgcaggccgatatgccgattgccgaaggcattgcggccaagctgaccggacgccccgcagccattgcgggcgacgatacggccaaacaggaggccaaggcacgcatgcgtgccgtgctcgccgaagccgcggccgaaatgcaccgtcactgagggctccggccgtaggcgaacaacaccgcacatccggaacacgtacacttgaataccatgcagcagatcaatatcgtcatctccggtttcgacccgtatgaaggcgtcgacgtgaaccccgccatgctggtgccgcaggcgcttgcggaacggtggcgggatccgtccgcggacgaggcgggctgcgacgatctcctgcaggacgtcgacgtggccatttcgaccgtcatgctgccggtcagtttcgccaatgcatggcccgcattgctggacaccatcgagaaggcgcagccggacatcatcatcgcaaccggcctgaaacgttcgtcccggggcatcctgctggaacgttgcgccacgaatcttatggatgcggccaagcccgacgccgacaatgtgatcccgagccgcaggccgatcaatccggaaggtccggccgcctactggacgcgcctgccgctgcggtcgatcctcaaggatttcgccaaacatgagattcccgcgaccctgagctctgatgccggcaccttcgtgtgcaactcgctgttctatcatctgctggattggtcggcacggcaggacaggcgcattctgtcgggcttcgtcagcctgccgatagtcaacgagcagccgcatccgcagcacggactgtcgctcgcccagcagatcgccgccggtcgcgacgtgattcgcgaaaccgtacggtaccatctgcaaccctcatccggcgacattctgttgggatgacatggacgatttctgggagattcctgttctctgtgtgagaattatgcgactgccgtgagtttcgtgttccgggtgcgctaaagtgcaaacggacagggctcggaaggtgagcgtcaaagagggaattcgcgaaaggaaagcaccatggtggaccagttcccaatcgtgttgagggggtacgacaaagatagggtcgacgaggcgttcgccgccgctcaggagacggtgaaccgtcttcgcgagcaggtgcaggccgatgaccagaccattctgcagcttcaggcgcagctgcaggaggagaagaatcgcaaggccaatccgaattcgttcgcatcgctgggtgccaacgcgcagcagatgctgagctccgccgagcagacgagcgccgaactgcttgaacgcgccaagaaagacgccgcagcggcccgtgccaccgtgcagttgcaggccgaaaccctgttgaacaacgccaagatcgattccaagcgcatcatggacgatgccaatgcgaaggcgaccgccgcactcgccaaggccaaggccgacgccgaatccatcaccaccaacgcgcagcgtaacgccgaccgtctacgcagcgaagcgcagaagaccgtaacggcacagcgtcagaccgttgatctggagctgacgaattcccgcgaggagcatgataagcgtctggcctccgaacgtgcctcccagcagcgtgagatttccgatatgcgcgcggaagccaccgagcagatcgccgcacagcgcaaaagcgccaatgaggagatcgcccgactcaaaagcgagaccaacgatcagatcgaggccgcgctggccgatgccaacaagaagctcgccgatgtgcgcgagcaggtttccaagatgatgaccgatgcgcagcgtcgtgcggcggaaatcacggacaccgccaaggccaaggcgcaggagatcaccgatgaggccgaagtgcaccgcaccaggaccatgagccaggtgaacgccgaggtcgagcagattcgcgccgacatctccgcccagcaggatgaggccaccaagaaggtcaatgagctgctggccgatctggccgaacgtcgtgaagccgccaagcagcaggccgatgagctgatcgccgaggcgaagaatacccgcgaagaggccgatacgtacgcttccgacaggcggaacacggccgatgcccaggccgcaagcatcgtcaagcaggctaccgaggacgccgacgaacagatcaacgaacgccgtgaagcggccaaggccgagctcgacggcgtgcagaagcgcatcgccgacctgcagacccgcgaagcgcagatcacgcagcgtgtgagcgaactgcgtgccatgttcgccaacgccttctccggattcggcgcatccaacctgtccgtggtcaacgccgtggacggtgagggcgctgacgacaatccggaggaaccggccgcgacgttcgatgaggacgccgccgatgaggcgcaacagggcgacgaagtcacgcaatccgccgaatccgtggaatccgctgaatctgaggaatctgccgaaactgaggcatctgccgaatccgtggaatccgccgaaactgtggaatccgccgaatccgtggaatccgccgaatccgtggaatccgccgagcacgcggatggtgagaccgacgaggagcatgacgagcggtaatcgctcgacggcatcgaatcatcgactagactcgatggcgatgaaggtacggcacctgttcatgacggcaggtgccgtttattcgtggcatcgtcatggaaatgggaatcggcacggagccgataacgatatgactaaggagcatgatggctgaaatcacgccgttgaataatgatgcattggcgtcgctcgacgcctcctttgaggcaagcgaacataatcgtatggccatgaacgccgtcaccgcagcgggcatcgacaaggtggcgcgcaactatgatcgtgcacgcctgctgcagcgccgtttctccaccatcgtggataacggcaccgccacgcatcaggaccgttcgggccgatgctggctattcagctcgctcaacgtggcccgcttcgttgccaagaagaacatgggcctgaaggagttcgagttttcgcagaactatgccatgtatttcgacaagctcgagcgcgtcaactactttctgaacgacatggccgcgctgatcgaagccggcgaaccggctgattctcgccttgtgcagcatctgctgcatgacgtgatgggcgacggcggccagtggaccatggccatgaacgtgtacaagaagtatggcgccgtaccgaaagacctgttcccggaaaccgaatcctccaagaacaccggtgagatgaacacgcatctgcgccgcatgctgcacaccgccgtggcgcacatgtacgccgaccccgcttcgatcgagtcggtcatcgattcggccaccgccgccgggcaccgcattctgacgattcatctgggcgagccgccgaagagcttcgactgggagtggaccgaccaggacggcgaattccatcgtgacggcgaaatcacgccggtcgaattctggaacaagtatgtgggttccgccgatctggagagctatgtgtgcctggtggacgatccgcgtcaggagcatgccaagggcaggaagatcggcatcgagcatttgggcaatgtggccgggggagacccgaccgaatatctcaacgtgccgaaccagttcatgaaggattgcgtgcgccgcattctcgaagaacagggcattccggtgtggttcggtgccgactgccatccgatgatggaccgtgagaacggtgcatgggccaccgacctgttcgaatacggcagggtgtacgacgtcgatttcgacctcgacaaggaagctcgcgtgcgctacgccgactctgcgatgaatcatgccatggcgttcgttggcgtggacgtggctgacgacggtcgcaccacccgccgttggcgtgtggagaactcttggggcgacaagattgccgacaagggctacttcaccatgagcgacgactggttcaccgagtacgtctacgaagtcgccgtgccgaaggctctcctgcccgacgaatacctcaaggcgcttgaagggccagcccagatgctccccgcatgggatccgatgggcgcgttggcccaataagcaagacgcaaggcgcgcaacgaggaaacgccgactgtcccaccatgcagtcggcgtttttcatattccgttcccatccattaatctgacttcggtaactcatatgagttcatgcatacgcagattcgtcaaggaggagtggaagcgatgtcaggtcttcgcggtccggatagttcacaggatgcacggctgttggatgaccacgccgtgtttccggagaccgtggatgtcaacattcgacagcttgacccgattcccgcccctcgatattttctcaaggaactgcccctcaccgacgagatgagcgatctcgtgctcacctcccgtcaggagattcgcgacgtgctgcatggtcgtgacgatcgattgctcgccatcgtcggtccctgttcgattcatgatccgaaggccgcgcacgagtatgccgaaaagctggccgccgtcaagcgagagcttgaggatcgcctggtcatcgtgatgcgcgtgtatttcgagaagccgcgcaccaccatcggttggaagggcctgatcaacgatcctgatcttgacggccagttcaatattcgcaagggcatgtggctcgcacgcaaggtactcaccgatgtgctgagcctcggtctgcctgccgcgaccgagtggcttgacccgatcaccccgcagtacatctgcgatctgatcagctggggtgcgatcggagcgcgcaacaccgaaagccaggtgcaccgcgaactcgcttccggcatgtccatgccgatcggtttcaagaacgccaccgacggttccatcaaaccggccgccgactcctgtttcgccgccgcgttcgagcatcacttcctatccatcaaccttgacggccgtgtgatctccgccgaaaccaaaggcaatcccgactgtcatctggtgctacgcggctcttcacatggaccgaactgcgatgccgcatccgtggcgcaggcgctggtcgatctgaagggctccaaggcgtccggtccgagcgaacatggtctgatcatcgatgcggcccatggcaactgcggcaagaatgaggtgcgcgaggccgaggtggttgaagacgttgccgcgcgtatcgcgtccggcgaacaaggcattctcggcatcatgatggaaagtttcctgaaggccggcaatcagaagccagccccgctcagccagctcgaatatggcaagtccatcaccgacgcctgtgtgccgtgggagcgtaccgatcagctgctgcacactctcgccgacgccgttaccgcccgccgcaatctcaccaaataacccttcctcaatccaccgacgctgggccccgcctcaccgtcggcagattgagaaggcacccaaaccaccgacggtgacagccgcccaccgtcggcagattgaggaaacatccaaaccaccgacgctgaggcggggcccagcgtcggcagattgagcatcctgttttgcgccgtgattgctattcttggggaagacagtgaccaaggagagacacatgcagcagcagctgaatacgccggaggaacttcgcgccatccggcaggcgatggacgagggcaagaacccactagtcgccacggacgtgccacgttgggaggatcaggtcggcatcagccgcatcgtgaaccgccgtgtgcttgaattcgaagtgctgcccaccccggctcaggtgctgggggagctgccgttgagcgaaaaggcccaggagatcgtcgcctattctcgcgatgagattcgcgcttgcctgtatggccaggacgaccgtctgctggtgattgtcggcccctgttccgtgcacgatcctgcggctgcgcttgattacgcccgccgtcttgccggattgaaggacgagctgggcggtgaattgttgattgtgatgcgcgtgtacttcgagaagccgcgcaccacggtcggttggaagggtctgatcaacgatccggacatcgacggctcctgcaatatcaagaaaggtctgctgttggcccgccacaccttgctcggtgtgcttgatgaaggattggcggccgcgacggagtttttggagccgaccagcccgcagtacatttccgatgcggtaagttggggtgcaatcggcgcacgtaataccgaaagccaggtgcaccgccagttggcgagcggcctttcgatgccgatcggcttcaagaacgccaccgacggctcgatcaaggcgccgaccgattcctgcttcgcttccgcgcagacgcataccttcttcggcatcgaccacttgggccgggcagccgtggtcaaaaccctcggcaatccggattgccacgtggtgctacgcggctcgagcagcggaccgaactacgatgccgcctcgatcgccaaggccatggagaccattcgtggcgagatgccggccgactccgcggccgcgcatggtttgatcgtggactgctcacacggcaattccggcaaggacgagcatcgtcaggccgaggtcgtgcgcaatatcgcaggccgcatcgcgcagggtgaggaaggcatcaccggcatcatgatggaaagcttcatcgaaggcggcaaccagaaggcggctccgctcgaccagctcgtatatggccggtcgatcaccgacaaatgcctgagctgggacaccaccgagcggctcctgcgtgaactcgcccacgccgtcagcgaacgtcgctggaagtaactcgtcagcctccttcctctgccatctcccgcgtcagagggagggccacatggaaaggaagatacatgaccgcaatcgccatcatcggcgccatggatgaggaagtcgcgcacatcgcggccgctctggacgacgtcgccgtcaccgacgaagccggcctcaccattacacgcggcacgttgacgaccgacaggggcgccgaatgcgacatcatcgccaccgttggcggcatgggcatggtgaacattgcggccaccacgcagcatctgatcgacgtcggtcatccggatgccgtgatcttctccggcatcgccggcaatctcaacccgtccctgcatgtcaacgacgtggtgctcggcggtaccttgcgctatctcgacaccgatatgcgtctggtcggccagtggaagcccggcaccgccgatgccccggtgcaggagttccattccgacgaacgtctgatcgcgtttgccgaccaggctctgaccgacctcggcatcacgcatatcgtcggcatcatcgccacaggcaactatttcgttgacgatccggccaaggtcgagcaggtcgtgcgtgagaccggcgccgacgcggtcgaaatggagggtgccgccgtggcgcatgtagccgcccgtaacgacgtgcctgcgctggtcatccgtgcgctgtccgacaacgccgacacggactatgaggaattcaaggccttcgatatctccgaatacgccgacactgcggcgaggcttacggtgaacatcatcaggcgcatgtagccgccaatctttacgtaccgccaatccttggcatggtcgccaggcccgactcctgacccgcatatcggcaggggagccgggccatctcatattccggaaccgccgattccatgaagatgaacgatggggaaacttccgatggcatgcgggaatcgcatgcgcgaatgcacccgtcaacccgctactgttgaagaagaatactggattatcggagggttaacgcatgacgtcagggcaatgggtgctcctcgccgttgcggcggttatggtgatcgcggccgttgcgtcggtcgcataccgcttcggccgggctttcgaagatggcccggcgccgaacgatccaagcacgttcggggcttcgaagaacacatcgctgttcggcccgcgcgtgcccgtgcaacagacggagcgccagctgattgccgtcatgccggaggcgctgatcgtcaccgacgcgctcgctacggtgcaatacgtttcgccgggtgcgcagcgtttcggcttgatcgaagacagtgcgatgacgcttgccgagatccgtgacattctgaagctggtttccgcggacagcgtggtgcgcgaacgtgagttggcgattcctctcgaccgcgccgcccgcgccgccgcgaagaatacgaacggcaaagggctggaagccggcaagaccctgcccgccgacaccctgtacctgcatgtgcgcgtcggacagatagccgacgacagtttcgcgattttcatttccgacatgagcgagcagcgtcgttttgaaatcatgcgccgcgatttcgtcacgaacgtttcgcatgagctgaagactcccgcaggtgcgatttcgctgcttgccgaaacgattggcgacgccgccgacgatccggatgcggtgcggtatttctcgggccgcatttcgaaggaatccgaacgattgacggaattggtgcaccgtctgatcgacctgcagaaggcgcagagcgcggccgcgatgctgaatgcggaacgtctttccgtgttgcggatcgcgcgcgaggcgatcggtgagaaccaggtgaaggccgaatcgaagcgtatcggcttggctctgtcgctgaacggcaggccggtgccgttgcgtgccggcatggcgggtgacgccaccgcatcatcaggcggggaaacggacgtgttcgtcgatgccgaccacgaaaccatcaaaaccgccgtgaagaacctagtggagaatgccgtcaactattccccgatgaacaccaccgtggcggtcggcatagggcatgagggcggcaaggtaaccatccgtgtggtcgatcagggcatcggcattccggcctcctcgctcgaccgcatctttgaacgcttctaccgcgtggatccggcgcgctcgcgcgaaaccggcggcacgggactcggtctggccatcaccaagcattgcgtgcaggattgcggcggcaccatcaccgtgtggtctcgcgaaggggaggggtccacgttcaccatcacgctgccggaggccggggatgcgccggaatctcgaggaaatgcggaaaccaagactgaagagaagcatccaaacactacagagaacacggaggagaaccactgatgacacgtattctgatcgtcgaagacgaggaatcgtatcgagaaccgctggtctaccagctcactcgcgaaggctatgacgtgtccgccgcagccaccggcgaggacgggctggaactgttcacccagggaggcgtcgatctggtactgctcgacctgatgcttcccggtctcgacggtaccgcgctgtgtcgcaggattcgtgagcaaagccgtgtgccgatcatcatgttgaccgccaaaagcgcggaaatcgacaaggtggtcggtctggagatcggtgcggacgactatgtgaccaagccgtactccttccgcgaactgctggcccgcgtccgcgcggtattgcgccgcaatcagatggtcgccgaatccgacagcgcctccgatgatgatattccgctcgtgtgcggcgacatctcgatgaagatcggccagcatgaggtgagcgtgcgcggtgagaacgtgttcttcccgctcaaagaattcgagctgctggaatatctcatgcagaacaagggtcgcgtaatgacccgtcaccagctcatcgaccgcatctggggttccgattacgtcggcgacaccaagacgctggatgtgcacgtcaagcgtgtgcgttccaagatcgaagaggatcctgcgcacccgaaatacctgaccaccgtgcgtggattgggatacaagatcgattccccgatcgagtgagggacgagtagacgaatactgttcatctaccgttcaccgattttggcatccggcaccgcaaacggccaataggcttgaaattgtcatgaagaacgatggcgacaccagacaatgaacctagcaacgtacgccatcagaatgttgacagagggaaaagaaacaatgcgtaactccattctcgtacgctccatcgccgccgtgtccggcatcgtgatgctggcttccgtcgcggcctgcggtgacaacaccgccgccaccgattcctcctcggccaagtccagcaccacgaccgaagccgtgtccggcaacttccagggtgcaggcgcctcctcccagcaggcagccgtcgaggcttggatcgccggcttccagggcaccaacccggacgccaaggtcgcctacaacccgtccggctccggcgcaggcgtctccaccttcctgaccggcgccaccgcatgggccggctccgatgccgccctgagcgatgacgaggtcgagcagtccaagagcgtgtgcgcttccggcaatgccttcgacattccggtctacatctccccgatcgccgtcgtgttcaacctcaacggcatttccggcaagggcaagaccctgaacatggacgccgagaccatcgccaagatcttcgacggcaagatcactaagtggaacgatgacgccatcaagcagcagaacccgaaggtcgacctgcctgatctcgacatcaccgtcgtgcaccgttccgacaagtccggcaccaccaagaacttcctgagctacgtcaaggatgccgccggcgacgcctggagctacgagcttggcgagaactggccgaacgaggtcggccagggcgccaagggcacctccggtgtgatttccaccgtgcagcaggccgacggcaccatcggctatgccgatgcctcccaggccggtgagctcggcaccgtggcagtgaaggtcggcgacgactacgtgccgttctccgccgaagccgccgccaaggtcgtggatgcctccccgctcgacgagtccgccaccggcgacaaccgcgtggtcgtcaagctcgaccacaacaccaccgaaaagggtgcctacccgatcgtgctggtctcctatgatgtcgcctgcccggcatacaaggacgccaacaccgccaagttcgtcaagtcctggctcacctatgtggtcagcgacgaaggccagcagaccgctgcctccgcagcaggttccgccccgctgtccgacaccatgcgccagaaggtcctcaagtccatcgacgccatcgagaccaagtgagcgaacggttccggtgaccggcaactgatcgcataattcaggccgcagccgcagcaaaacgtggctgcggcctgaagcggtacttacggtatgccgtccggaatccgatcgcaaggctcgtaaacatacgcaagttaaggagaacccgtgagttcgcaaagcaaaacggctcagcagccggtaagcggcaagaacgcggataaggtgttcaagggcgtggcctacgcctgcggcatcctgatcctcgtggtgctcgccgccgtcgcgctgttcctgctgttccgtgcgtggccgctgatcggcggcgaccagaaggccaacagcgccaccatcagcaacttcaccggcggcaaggccacaaacttctggggctacgtcggaccgctgctgttcggtaccgtactgatctccgccctggcactgctgatttccttcttcgtgtcggtcggcatcgcactgttcatctcgcattacgcacccaagaagctcgctacggcgttgagctatgtggtcgatctgctcgccgcgatcccgtccgtgatctacggcctgtggggcggtctgattctggtgccggccatctacccgttctggaactgggtggccaaatatcttggctggatcccgctgttccaaggcccggccgccaatccttcccgtaccgtcgccactgtggccgtggtgctcgccgtcatgattctgccgatcatcacctccatgtcgcgagacatcttcatgcagaccccgcgtctgcaggaggaggccgctcttgcgcttggcgccaccaagtgggagatggtcaagctcgccgtgctgccgttcggcaagtcgggtgttgtttccgcctccatgctgggcctgggacgtgcgctcggtgaaacgatggccgtgctcatgattctttccccggggctcaactactccatcaagctgttgcaggcctcgcagaaccagacgatcgccgcgaacatcgccgcccagtatccggaggccaacgatcttggcgtttccgtgctgatcggcaccggcctggtcctgttcctgattaccttcgtggtgaacttcatcgcccgtaagctcaccgagaaagcgagtgcatgatgtctgccgcgcaaaacaacgcttcgccgatggacggcgctcccgtcatcgacttcgacaagttcaagccgacccgctccttcaccgccgcacgcaagcgcaaggatctggtgatgagggtcctcatcgccctcgctttcatcgtggccctgattccgctgatctcggtgctgctgaccaccatcatcaacggcgtcaagcgactgaacctgaacttcctgagctataacatgaccggcgtggtcggcggcaatcctaccccgtccggcggttacggcggcatcctgcacgccatcatcggcacgctggagatcacgttcggcgccatggtcatctccatcccgatcggcctgatgtgcgccgtgtatctggtggaatactccaaccgtggcaagctcgcccgcgtgatcaccctgctcgtcgacgtgatgagcggcattccgtccatcgtggcaggcctgttcgccttctcgatgttcacgatcctgatcggaccgggcaccatcaacggtttcgaaggttccgtggctctctccctgctgatgctgccgaccgtggtcaagtcctccgaagagatgctcaagatcgtgccgcacgatctgcgtgaggcatcctatgcgttgggcgtcaccaagcaacgtacgatcacgaagatcgtgttgcgtaccgcattgccgggcatcgtttccggcgcgatcctcgccgtcgcgcgagtgatcggcgaaaccgcgccgttgctgatgaccgcaggctacatcgcctccacgaacgtcaacctcttctccggccagatgaccacccttccggtgtacgtctaccaggaatattccaagctcaacgcgaactgcccggcttccgccgacgcctcgtgcgtgaccaccatcccgatggaacgtgcctgggccgccgctctcgtgctgatcctcatcgtgctcatcctcaacctcatcggacgtcttgtggcgaaggtcttcgccgtcaagtcggagcgctgatcccggagccgtcgcgcaaggcgcggctgagggtagtctgaaacttagcaaataaatcataaggaactcaaatgggacaacgtattgatgtcaatcatctgaacatctactacggcgacttcctggccgtggaagacgtgaacatcaacatcgaagccaacaaggtcaccgcattcatcgggccttccggatgtggcaagtccaccgtgctgcgcacgctcgaccgcatgcacgagatcatcccgggcgctcactgcgaaggcgaggtgctgctcgaaggcaagaacctgtacgacaaggacatcgacccggtggcggtgcgccgtgatgtcggcatggtgttccagcgtgcgaatccgttcccgaccatgtcgattcgtgagaacgtgcttgccggcgtgaggctcaacaaccgcaagatctcgaagtccgacgcggacgatctggtcgagtgggccctgcgtggcgccaacctgtggaacgaagtcaaggatcgccttgacaatccgggcattggtctgtccggtggtcagcagcagaggctttgcatcgcccgtgccgtggcagtgcatccgcaagtgctgcttatggatgagccgtgctccgcactcgatccgatttcgaccctggccgtcgaggatctgatcaacgagctgaagaacgactacaccatcgtgatcgtgacgcacaacatgcagcaggccgcccgtatcgccgactacaccgccttcttcaacctgaaggccgtcggtcagccgggtcatctcgagtacttcaccgataccaccacgatgttcaacaacccgcagaacgaagaggccgaacgctacgtttcgggacgtttcggctgatcggcaaagccaatctgccgaaacgtagcgacggtccggcgggccgtcgcaagctagcttgagctagtcagcggattgtgcttcgcgaagcgaagttccgtaattgcacgtttcggctgatcggcaaagccaatctgcaaggctcccgcaggaatcccacctgcgggagccttggtatacgcgcctccttctcgtggtctcctactcctgacctatggcgatgcctatccgataatcgttggaaagcaaggactcggtcccggcgacacgcattgttgagaatcattctcattttgcgctatgatgattgcgatacataggtttgagcaggaagaacatcatgaagcgtatggtacaaagggcggtctcggtggttgcggcgatcaccatgctttcggcattgggtgcgtgcggcggcggtcagtccgcgaatggttccgatgaggacgccatcaacgtggtggcctccgtcaatcaatggggcaccgtggcgaaggccttgggcggtggcaacgtcaacgtgaccagcatcatcaattccacgaatgtggaagcgcacgactatgaaccgaccaccgcggacatcgccaagttgcagaaggcgcaggtgatcgtcgtcaacggcgccgactatgactcgtgggccgtgaaggcggcgaagtccaccaaggcgaacgtcgtcaacgcggccgaggtgagtggcaagaagagcggcgataaccctcatgtctggttctccgcgcaagtgcgcgaagacacggccaaggcgatcaccgcggcctacaagaaggccgttccgagcaaggccgatgatttcgacaagctgtatgagcaatggcagtccaaggagaacgatctcgccaagagcatcgccgaggtcaagaaaaccgctgatgggctgacctatgcggcgactgaatccgtggccgattatctggcgagcgaccttgggctgaaggacgtgacgccgaccggttatgcacaggccaccgccaatgaaagcgaaccgacgccaaccgacatcaagcagttcaccgacgcattggaatccggtgagatcaaactactggtcgtcaatacacaggaggagaccgatctgaccggcaagatcacggacgcggcgaagtccgcgaacgtgccgatggtggaactcaccgaacagatgccggacaagtatgattcgctgactgcgtggatggagggtctgatcgacgaattcagcgcggccattcagcaggcgggctgatgctcgttcctgccgcggtcggtttggatcgggtcggcaagtccccgccggccgtacgcatgaacgcgtcgtgaatgcaacagtgcacataacggtacatatcaacatgggcgactcaccgcacggtggagtcgcccatgtcgtgtattcggaagcgatccggacttggaacgcccgaggatgactacagaatcgcagtcactacgaagtccaggatgaacaggatcgccactacccagatcaccggatgcacgtccttggcctgcttcttgcaggtcttgacgatgcagtaggtgatgaaaccgccggcgatgccgtaggagatggagtagctgaacgccatgaacacggaggcgaagaacgccggaatggcttcggaaatgtcgccccactcgatttccttgagcgaggaggccatcatgcagccgaccacgaccaacacgcctgcggttgcggcgctcggcacggcggaaatgaccggggacaggaatgcggacagggcgaagcagacggctacgaccacggaggtcagaccggtgcggccgccggcggcgatgcctgcggaggactccacgtaggtggtggtgttcgaggtgccgcagatggcgccgatggaagtggcgatggagtcggcgaacagggccttatccatcttggaggagaagccggagccgttctcaagggcctcttcgtcagcggcggagaagatgccggtgcggcgtccggtgccgatgaaggtgccgatggtgtcgaaggtgtcggacatggagaacgcgaagatggtcagaatgatcatcggcagcttggccacgtcggagaacagcgccgggaagccgtcggcggtgaagatcacgccgaaggtctgcggcagctgggcgaaggtctcggagatggacacggagttggccatggtggtctgacccatcgggatgccgatgatggcggtcagggcgatggcgagcagcatgccgccgcgtaccttgagtacggtgaaggccacggccaacagcagaccgatgaggaacagccagatggtcgtattgttcatgacggccaggccgggggtggcctgtacggtgtcgccgctcttggcgtcggccttggtggtgaaggtgaagaagccgacgttcaggaagccgacgtaggccacgaacaggccgatgccgccgccgatggcgttctgcagcacttccgggatggccttgatgatcatcttacggattttggtgacggtgatgatgatgttgatcaggccgcacaggaacaccatgcacagcgtctgctgccaggagaagccgaggccgaagcacacggtgtaggtgaagaaggcgttcaggcccatgccggcggcctgcgcgtacggaacgttggcgaacaggcccatcacgagcgtgccgatgatggccgcgatgatggttgccaggaacacgccgccccacggcatgccggtctgcgacaggatctgcgggttgacgatgatgatgtacgacatggcgaagaacgtcgtcagaccggccacgatttccgtggatacggtggtgccgttctccttcagatggaagaacttttccatattctctatctctatctttcttgggttggtaggagcgggccggcttgtgcggggcttgctccggcgagaatcgcgactcgcctggaatcataggattccgaacgagcccaaccgtagcacttccatgagtcatgcacattgcgtgaatcttccgagagaggctcgagaggctccttcggttttcgctggattccgattgtcggccggacacgacacgcctggagcgtgttagtccagcggcatccgtaagttattcatctgtaaaccacagaccgttggttggagtgtgcaaacactcacgaagtttggttcgccaagccaacgcaggttgaagaacatacgcccgtcaagggtatgccgcttagcggtcgaatgttgctctgcctgcgtgcagggtttttttgttgcccggcgagacgttccgaacctcacagtcaatggccgactaaggaaggaacgccatgaagaggcccgaaaaggaagcggtggtcgcccagcttacggataagttccgtgacgctgatgctatctacctgaccgagtaccgcgggcttaccgttccgcagatctctgaactgcgtgaaaagctaggccgcgatacttcctacactgtggctaagaacacgctgattcgcatcgcagccaaggaagctggcatcgaaggtctcgacgagatcctcgccggcccgaccgctgtgaccttcgtgaagggtgacttcatcgaagctgcgaagaccctgcgtgacttcgccaagaccaacaaggcactgatcatcaagggcggctatgctgatggcaccgtctacgatgccgaaggtgctcagaagctggcagacctcaagtctcgcccgcagctgctcgccgaattcgccggcgacatcaaggctacgatgtccaaggccgcgtacctgttcaacgctctgccgaccaaggccgtgcgtacgatcgatgcgctgcgcgagaagcaggaaaaggctgcctgatttcactgcggctcgccgcgtgaatcgacaactgaaaagaaaagatacaaattttaggtgacggttacctcttcaatttgaccccgtcgccaagaatgaaaggaagccattatggctaagtacaccaacgatgagctgctcgaagctttcggtgagatgaccctggttgagctctccgagttcgtcaaggccttcgaagagaagttcgacgtcgaggctgccgctccggccgccgtcgccgttgccgctccgggcgctgctgctccggctgaggaagagaaggatgagttcgacgtcatcctgtccgccgttggcgacaagaagatccaggtcatcaaggccgtccgcgccatcacctccctgggtctggccgaggccaaggctctggtcgacggcgctccgaaggccgttctggagaaggccaagaaggaagacgccgagaaggccaagtcccagctcgaagaagccggcgccaccgtcgagctcaagtgattcgcgcggcttgaagccgcaatcaccacgcttggagaaaaccccgtttaccgtgtggcaaacggggttttccgctatatgcgcaaccttggcaaccgttggtatgaggcggattgcacgcggtggccgttcgccggtcggggaaacacagggtcgtcaaagagtgggtgagtatggtgtggcggcgtgaacagcaagcaatctcaaaaaaccaaaaccaagaaggatgccgatgccgaatatgcggaaatgacacagggtccgctccgctcactgatcatcaggctcgccgtcccggcaatcatctccaatctcgtaaccaccatctacagcctgtccgacacgttcttcatcggacgtctcggtaccgcgcaatccggtgccatgggcatcgccttcagcgtgatgaccgtaatccaggccatgggattcttcttcggcaatggcgccggtaattccatgagtcgcgagcttggcaaacacaacgacgcacgtgcggccagactgctctccgtcgggtttgtcggagcccttgcctcaggcctggtcatcaccgtggtcggattggccacgctacacccgctggtgcgcatgctcggggcgactcctacgatcgagccatacgccgtaacgtatctgataccgctgctcgtcgcagctccgatgatgtgcggatccttcgccttgaactgcctgctgcgctatcagggcctcgcttcgctcgccatgatcggattggtcaccggttcggtgctgaatctcgtattggaaccggtattcatctttctgctgcacatgggcatgttcggcgcctcattggcgacggcgatctgccagaccatcagtttcgtcattcttgcagcgctcggcatgacatacggcgtggtacatttctcgttgcggcaatgccggattaccgttccgctcgcccgcgagatcgccggtggcggactgccttccatgattcgcaacgcggccggcacgctcgccgtcacctgcgtgaacatcgccgccaatccgttcggtgacgcggccatcgccggtatggccatcgtcatgcgcatcatgcttggcgcgaactccatcatgatcggtcttggacagggcttccagcccgtttgcgggtataactacggcgccggcctccatcaacgggtgatgaagggattttggttctgcgtgaaggtcgcgaccatcgcgatgcttgccttcgccgcgatcatatggattacggcacccgatctggtgcgcgtcttccgtgacgatgccgcagtggtgacggtcggtaccgccgcgcttcggttccaatgctgcacattggcgttgaacggatacaacatgatggccaacaccatgcagcagaccatcggcaaaaccgttgccgcctccttcctcgccttctgccgtctgggactgttcctcgcgccgaccgtgctcatcctgccgcatgtgttcggcatcaccggagtggaatgcgcccagtgcgtctcggatgtgctgacgttgatctgcaccattccggtgcacaggcgcatccttgacggattgaagcaatcgtaaatcgcgctctgagcggtccggagggcgaaagtcaccactacaatgggggaaataggcggaagttgtcaatttgacgcgtcataatcctccataacatggtgaagcatgacacaatggcagtagtgttgtgtgcgaaaggaaggccggaacggtgagcgaagatcaacgaacggcgcagcagtggatcgtcggggtcggtgaaagcgacctgaaaacggtgaaatccggcgaaagcgtcgaacttggacgcaaaccgctgcggccgctggcggatgacggatattcccgtctcgatatcgcggattccaacaagtcgatgtcgaagcgtcatgcggtgttcgccgtggacgataacggcaccgcgaccatccgtgatctgaactccaccaacggttcgttcgtggtacgtccgaacggtgaactgatgcgcctgccctccgatgtcgatttcatgttgccgagctcgccgatcaccatgcagttcggtgatgtgaaggtcacgttccgtcgtgagcgagtcgctgccgatgccgaagcgaagccggcggtggccgatctgttcgattatgcgcttgccgatgagggaccgcaggagcccgatgcggccgacatgtcggtggatgacattctgaatctgcgtgccggcgaaccgaccgcgctgttcaacgcccgtaatgtggcctctcgcgtggacgcgctgcataaggccgagcggcaatcctttgcgccggtacgcgccggcgaggccgaatatgaagtactgccgtcggtatcgctggtgcagccgcaggatgaggcgcacgacgatgctccgcgcgatttgttcgccgatgcgcaggcggaagccgatgcgcgagccgaacgggatcgggaggacgtcgagctgaccgacgccatcgaccgtgccaaggcgcaggccgccaccgtacagggcgtcaatgaggcattggccgccgatgccgcgaagtcggatgcgctcgcacaattgaagtccgacaccattgccgtgaatgacctgttcggtgccaggaatgccgatcggcagcaggatgagtccgatgcccggcaggattcgctgaatctgccggaacatgggcaagacgaagagcagagcgaaccgacccaagagcggcaagaggagccggtcgaacccgtcgaacagtcacagccggtgcaggagacggtcgccgagcgggctgagcaggccgaatcatccgaccgatccgacgatgagcggcctcaggtaagcgccgacgacgaacgattccgcccgtcggcgtcacagaacgatatcgagccgtccatcgacgcgaccgtgacgttcactccggtattcgaaccgggatccgtattcgatcgcgtgtccaaaggtggtttcgtcaagcaggagcagaccatcgaggtcgacggcctgacctccgatgaagccaaacgcaccgatgacttcaccgtgcagttcgagatggcacgccatccgcagttgctgccgttcctcgccatgaacccgtcgctgtacgatgatctgtacgcatggctgtcggcattgggcaatcaagatatcgacgcagccctgtctcgcaatcctgggtatgcggaataccgtaaagcggtagggaagtgagtcaacacatgagcgaaagcaatgagcggtccaccactgcgctggaccgcattcgcggctggcgtgagcagtaccgtctgggattgtcgccttccccgcttgaagacgtgacgcaactgaccgcgcagctggatctgacgcatgcccacccctccggcatcgcgcaactgttcgccagcgggcatgtcacgttggattcgctgtttcgcgacaacggcatgctgcgtgcggccggtcgccgcgtggaacgcgtgattgacgatcgtgagacgaaaagccgtatcagcggtgtgggcgaactgtcgctggtcgtgggcgtggccacatggaagggcaatcaggtaccggtgctcatgtacccggtcgaagtgcgccggaccggcaaaaccgccgaaagcggcaccaccatcgcctttaccggccgcgtacgcctgaacgcctccttcgccgccgtcatgcgtgaacataacgttgcctttgatgaggccaagctgttcgatggctccaactacgagagcggcactcccgaaacctcggcggtgttctccgccatcaccgcgcgcgcgacttcggcattcccggatttcgagattgagcgtcatatcattctcggatgcttcatggatccgtccacacagatgctggtggaaagccagaagatcatcgaccagttggcgcagggacctaccggcaataccgtgctggacgcgctcgcaggagacaaggccgcccgtgacgcgctgaacaatgccgatatcgccgaatacagcccgtttgatggcgatccgcacggtgaatatgaggtcggcgatgtcagcaacaccgttcgctacgccgcacagattgccgcttccgggcattcgctgttcgttgacagttccatcggcaacaacacagccgaacaggccgcagccatcgcctcgcgttgcgtgatgagcggccggtccgtgctgtatgtgccgtgcgtcaccaatcagcggcgtcgttttgcgcaggccatcaacgccaatgagatgggcgggcaactgctcgacatcgcagacgacggcgccaacgcggccatcgaccgccagctgattgcggcggtcggattccagtcgggcgtcgccacctctcgtttcgatcagttggcggacgaactggtgggcgtacgttcccgcctgacccgatacttgggcgatctgcacggggtcagccaggaatggggcgtttccgcctaccagaccattcagaacctggcacaaatcgccgtgttgcccacgcgtccgaccacgcatgtgcgcctgagcaagcaggccgcccacgccatcagcgacaagatggaggattgggccgtcaagatgcagcgcgccggcgaacttggcgaatattcgatcaccgaaaaggacaccgcctggttcaaggcctccatctattccgaggaagaggccgtcagtgctcatcagcgcgtggtcgaactgctgcgcaaggtgcttcccgccacccgtgaacaggtggccagcaccgtgcagacctgtggtttcccgattccgaccaccgcgcaggagtggggccgccaggtcatggtgctcaagaatctgcgccgcgtgcttgacgtgttccagccggagatcttcgaacgtgacatcgtctccatgatcgaggccaccaagccgaaggccgagcgcaaggccgaaggcagctccatgggattctgggagcgccgccgccatatcaaggaagccaagggcctgctacgtgtcggcgcacaggtggagaacctgcatgacgccttgcaggtggtggccaagcagtcggaacagtggcacatgttcgtgccgcacggtggttggccggtgctgcccgccaagcttgacgacattttggaaacccaggacgagctgacccgcgatatgacggccctgaatacgattctggccaccacgccgatgggcggcagcttggagaccgtggacttcaatcaggtcgaggagcgtctcaaagccctgtacgacgatcatcagtcgcttgacaccctgccggagcgtgcccgtctggaacgtgaattccatgacatcgggcttgacgagttggtggaggatctacgcaatcgcggcatcgacgacaatgccgtggccggcgaactgcagctggcttggtggaccacggtgttcgaagacatcgtgcgttcctccgcgatcatctccaaccaggacggttcggctctgcaggccgcagcggatcgattcgcccaggtggatgtggagcatgtgcgctccgtcgggcccatggtggcgcaggaatccatgcgccggctgtgcgacatgctgttctcccgcacgcaggaggccaatctgctgcataccacgcttgccggttcccgcagcgtgtcgttgaatcgcctgcacaaggagcatgcccagatcctcgccgcggccaagccgattctcatggccaccccagccacgcttgccgcggtcaccgatcccgctcctcttgccgatgtggtgatcgtcgatgcgggtgcgcatattccgtccgtggaattgatgagcatcgtctgccgtgcgcagcaggtcgtggtgatcgcgcatcgcgaaaccgtcacctccgacagcgtacggtcgctgatcgcactgctgccgagtgtgaagatcgccgaccgtccggttcgtcgtgcgccgaaactcggtgccttcctcgaatccgaaggttatggatcgctgtcgcttgacgtggctcgtgagggttctcagggcgaagtcgcctaccattacatcgaagaggccaacggcgtgcccgtcatgacctccggactggtggagagcagccagcaggagatcgacgaagtggttcgcatcatcacgcagcgtgccgcctcgttcaccatcgtgcccgcctcctacaccctgacggtggtggcgctcacccatacgttccgtacccgattgggggccgagctcaaggcgatggccaccaagaacaaggcgatgggactgttcctgcgccatgtacgtatcgtggacatcaccgatgtcgccggagcccacaccaccgacgccatagtggcgatgtgctatgcgaagacctcgcatggccgcctgttgcagcagttcggtgcgcttgaagccgaaggcggccgcggcatgttattggatgcgctggccgttgccgatcgtcatgtcgatatcgtctccgcattctcctcgacggacatggatgacgagcgcctgcaccaatccggcccgaagatgctcaagaccgtgctgcgctgggccgagcagcttgacgatcgtccggtacgcccgtcggagaacgagtccggcaccaacatcctgttcaacgacttggccgaccgtattcgtgcccgtggcctgaaggtcgccgtcgattacggattcgatcgcggtaccaggctgccgctggtcgtgggattgcccgacaagccgttctcgttggccgtgctgaccgatgatgcccagttcatgggactgcagtccaccaggcaacgccaccgcgtactgttgcaggacatcgaatcgttgggatggtccgtgatgaccgtgtggagcgtcggcgcgttcgtcaatcccgataaggaagtcgaccgtatcgtggcgcgtctgagcgatatctaccaggagggcaagtgagcgaagcggcttccgacaaggagcgttccgggcaggagtccgtcgacggtccggccgtacgagtggtatccggatactgcgcatctcgtcgcactccgcgcaaacataagcgtgtggtacggcagggcaccgagctcttcgatgccgatggcgtaaagctcgaaccgtcggacgtgctcaccgaccggcagcgtgcggcggatgacgacaaacgcatcctcaccgaactgccccctcactggggcgtcttctccgaacgcggtcattgatcccggtcgtccgcccgggtcgttccggacgggcaagacgcggcgggcgtgagtagaagctaccgggtgacggcaatgatggcggcatactcctgtacttgcagcacggccgccgcttcatccggcgacatggcgaacgtcgccgtggccatgccattggcgtctttggcaggcttgccgatcaccatcgcccgtgacgcaagctcgcgcagcgctccgccatcatcgccggcatctccttgcgcaggcacggcgccggaaagcgtcacttcatcgccgacgtcaagctcgtcgatggagctggacaatcgcacgtcgaccgccgtatggccttgcggaatcatgggagaggcgcgtgccatcgttgccgtgacgatgccgccgtcgggaatgtcgatttgcgcgaccatgcccgtaacgtcatcaatcgtatggaatgcgttattccaggcggcatcgtatgggatgtctcttacggcgacgacggaggccgtgatcgtgtcgccgcggcggatgcgttgggtcgtcacgactgcgggacgggtttcaaccgtcgaccgcaggcactgcaatcccaggaacaccgccaatcccgcgcataatgcggccaacaggcggcgcaatcgtgcgctccgaagcggattcctggccaggcggcgcatggacggctgattcgtcagattatgcaaacaggtcatcatgcgagcatgatgacctgcgggaatatgatcgcgcaagccggatcaggggttgtggtcgaaggatgggggttatccacatcatcggcgtgtcgcgcctggctccggggccctgtctacttggatttatccgtgcggtagaagccggaacccttgaattcgatcggaacggcggaatagaccttacgcacctgctcctcgccgcacttcgggcacacggtaatcgggtcgtcgctgaacgactgctgttcggtgaaatcgtaattgcagttcttgcaacggtaatgataggtaggcaacggttttcctccacaacttcaaacggggttcacacgggtttcgtaacgtgaccatatcctagtacgcgccctgagacggcttgatggggcatttcacagaatgtgcgcaggcgatgcgtgaccgtcgcgttcatcgaatggccatgtacccgtccggggtgagcgccgcatcgacgggaacgtcgtgcggctcgtgcggtatcggcgtgcttgtggtctcccacggccagcagatcgccactactcgcgccttggccgccttgtattccagtgcgcggtcgtaccagccgccgccacggcccaggcgaatgccggatgggtccaccgcgaaggccggtacgatgatcaattcggcatcgctgagcgtgtctggcccgccggagggactatccggttcctgcggacggcgcgtattcggcgaaccgtcatcgccgcgaacgctgcgcaacccttccagatcgtcgagttcgctccatccgatggtcatgccggatcccaatcggggcaccagtacgcggcattgcgcgtcaagcaacgcctgcagcagcggagccatcgcaatttcgctgcccatggaaacgaaggcggccaccgtggcgaaagggtgaatcagaccttcgtcacaggcatgcaaggctatgcgccggccggcctcgaggcgttcctcgggtgtggtgcgtttgcgtgcggcgatggcctgatggcgcatggcctgtttcatggagcgcagtcgttcggctgcctccgggggctcggtcgcttcggtcgtgtccatatcgcctgttgtatcacgacatgttgtatggaacgtgacggcggggcggtgggtggcacaataggtgcgtgaccgttttccaagcattccgcgacatgatatgtcccatacgggccaatgccatcgccgtgccgcagttcatacagtcgcaggcactgcaggtaccgatccggctgcgtccgcttactgcggatgatgacgacgaatggaatgaggtgcgctggcgcaacgatgcctggttgcgtccgtgggagtcgggcgatccgttgcacggccagtcgatgtcgttcgatatgtggatacggcggttgcgcagtaacgagcgtgacggcaccggggtggtgttcgtcatggaacatcagcggcgcatcgtcggccagatttcgctcggagcgatttgctacggcgcgatgcgtaccggcgtagtcgggtattgggtggatgaacgttgcgctgggcgtggattcgcgccgatggcagtgacgttgttggcggattgggccatgttcgaccccgacgggccgcacctgcatcggctggaaattgcactgctgcccgaaaacgcccgttccagacgtgtcgccgtcaaggtaggggcgcatttcgagggggtgcgccacgcctacatgtatgtcaatgggcggtggcgcgatcatgagacctacgccatgacatccgaggacgcccccaacggtttcacggccaggctgatgactgcgtaggcccgacacgcccgaaacggatgtggccagattgtcagaaagtcacctattcttgtgacctatgggttatgagtcgttaagcacggtggtcgtgcttgcgattgtcgtgattctcatggttggatggctgccccgacggacggtcaaaggcatgaagcgagtgatcgaacatcgcgaagaccggttttcgccgtcgttgcatcttgtggatgccgatagcgggacgaggttctccgacgtgagcacgccgcaggcgaaaggggctataatgcagtcttccgaggctcaggggggcaggatgtccgaagagcatatcgcccaagtgcgcacccttcgccgagctgcgatccggcgacgtcgaatcatcgtcgttgcgctggccgtgacgacgattgcggtgatcgtcgcagcggttgcgttgcatttcagcgcatggttcgcgcttattccggcggtcatgctggttgcggtgatggcccttggcgtgcgtgccgccaagcaggcgagggattgggagcagaaagtcgcccgatatcgttcccggatgaggaagcaggccgccgccgaacgtgagcgtgcgcgtgccgagcaggcggaacgtaggagactgcatgatgcggaactggccgaagcgcgcaggattgccgaaacgcaggttccgaccgatgtgatgccggaaggggagattcgccagaccgtcgaacgcggcaaagcggaccgtgatcgtgcgttgaacaaacgcaagcaggaggccgcggcgaagaccgaggttgcgccggaagccactccggaccggcgggacgccggtctgtccattcatgacgaacgtgacaagcagcaggatatggctgaacatgccgaggacaagccggtttccaaggagatttccgtaccggaccaatcctcacaggatttgatttcgttctcgctgggagctccgcgcaacggtgtggaagtcaggcaggccgtgccggaaagcatggaaatcaagtccaccaggcaggtcgccaaggccataccgccggtcaggccggttgagcaggccgaacccgtcgaaccgttgatcgtgccttccgatgccatgagcgacatggatgaagatgagagcggggcgcgtgttgaggctggcgtgcagctcaacgaggtcagtgtcaaggactttcatgatacggaggtcagtgccgaggtgacggctcccgatgccacctccgattcgcttggcaccggtctggaagccattctggcccgtcgtggcgcgtgaggcgcataaacgtgtcgaagcctgaaaccgcatggtttcaggctttttcatagggtttctctctcagcattagcactcgagttggcagagtgctaataatcgcgctagagtatatcccagcgcgaaaaggacgacgccgtaagtgatcgtcagcctcttgctagcgggtcccggcgcggtaagtatcgatttctcttaagaaagaggaggtccacagtgtcgatctcactcacaccgttggaagacaagatcatcgtcaagcaggcggaagccgagacccagaccgcttccggtctgttcatcccggacaacgccaaggagaagccgcagcagggcgaagtcctggccgtcggcccgggccgtcgtaacgacgccggcgagcgcattccggtcgacgtcaaggtcggcgacaaggtgctgtattccaagtacggtggcaccgaagtgcactatcagggtgaggattacctcatcgtggccgcccgcgatattctggccatcctcggctgagcgtagcgtagcgccgtttgttcatggcgaagccccgttcctgtgtgggaacggggcttcgctcgttttgtggcttctgtgttgcggtttcccgatcgggaatcgctattccatcaatccggcttccgtgagtgcgtggtcgatgtctcggatcagatcgtcggtgtcttcgagtccgactgcaaggcggaagaagccctgatggaactcctgcgggtacaggtattggcattcgtcgtcctctccgaggaacacgatcaggctctcgtcatgtccgagcgagaccgccgaggtgatgacgttgagcttggagacgaaccggttgtggccttcgtggtccgtattgagcccgaaggcgagtacgccgccgtatccggccgccgggtgggccttctggctggttgccacggtgtgtcccgggtgtgattcgagtcccggatagctgacgaaccgtaccgcgtcgatccgttcgagatgttcggcgatggcctgtgccgaggcgttgtgctgcttcatgcgcagcgggagcgttaccgtgcctcggttgatcagccatgcgttgaacgggctgatgatgccgccgtagttgacctgggcggtgaagcggatctcgtcggttcgggccttggtggtggctatcatgccgccgagggcgtctccatggccgttgatgtatttggtgaggctctccaccacgatgtccgcgccgagttccagcgggcgtacgttgtacggcgaattgaaggtgttgtccacgctgacgaggatgtcatggccaagccgttcctgcgcctcgcgggcgattgacgtcacgctcgctatgtcggtgaccttcagggtcgggttggctggcgtctccagatgaaccagcttggtgttcggcttgatggcgttgagtacgttggccgggtcggaggtgtcgacgatggaggtttcgatgccgtacttctcgggcagaatctgattgagaagccggtacgcggcgatgtatgtcgtgtcggagaagatcgcatggtcgccccggttgaggaaggtggtgaaggtggcggcgagtgcggccacgcctgaggcgagcacgacggcgtcctcggctccttcgagattggcgagtttcgcctcgagataacgctggttcgggtgtccgttgcgcgtatagaggttcacgtccgagcttgaccagttgatgtcgctcgggtcgtagggcagtgcgtaggcgttggccagggtgatcggccgtcggatcgctccggtctccttgtccacgccgttgccgaggtggatggatttggtgccgaagccgagcggctggtcgtcgaatgattgtccgtggtgtacgagttctgaagtcatgggaaaagtcttgcagaggctcgtttcgttttggagacgaacatgttacgtaaaaagcgcgggattccaacgattatgaggggtccggccatgtgcgacacgccgtatttgcgtttatcggaggggtcgtggcatactaaacgggttgccggttggggttcaaaccaaacaggcagcacggcggatttcccaagcggtcaaagggaactgactgtaaatcagtcgcctcgtgcttcagtggttcgaatccactatccgccacgcctcgatagctcagtggtagagcacttccttggtaaggaagaggtcgtgagtccgattctcactcgaggctctcatggcgggatagctcagctggctagagcgtacgactcataatcgtaaggtcaagagttcgagtctctttctcgctacaaaggccgacggcatgtcggtatagcaacgaaccacaagaggtgaactagatggcaagcaagagcgccgacattcgtccgggcatcacgctggcatgcaccgagtgcaaggagcgtaactacatcacgacgaagaaccgccgtaacacgccggatcgtcttgagctcaagaagttctgctcccgctgcggcaagcagaccgtgcatcgcgagacccgctgagcgagttcaacactttcaaacccgaccatttcggtcgggtttttgttattctggagcactatgacaagttttgcagatctcaccaccatcggcgttggcgggcccatcgccatcttccttgaacccacttcgcgtgtcggcgtcatcgaagccgttgaagatgcggatgccaagggactgccgttatgcgtaatcggcggcggctccaacatgctggtggccgacacgccgttcaacggtgtggtcgtccgcgacgcacgccgcagcatcaacgtgcttgacgaggccgctccggtggagaacggcgagagaatcgtacacgtcaatgccgaagccggctgcaactgggacgatttcgtggatttctgcgtcgaactcggtctggaaggcgtggagggactgtccggaatccctggaaccgttggcgcatcggtggtgcagaacatcggagcctatggccaggaggtcggttccagcgtgcgcagcgtggaggtctgggaccgcaaggagaaacgcacctgcgacctcaccgccgaagatctgcgcttcggctaccgcatgagtgcgcttaaggccagcatgtatgcggctccggctacgccggccgacgaattcttcccgaccccccgatatgtggtgctttccgtcaccttcgccctgcaccatagcgataccggagtggtcggctatggtcagctcgccaaggcgcttggcgtcgaggtcggtgatcgtatgaataccaaggatatccgcaacgccgtgcttgcggtgcgtgccgccaagggcatgctggaggattcccaccgctaccttgccgaacccatgcgcggtaccaagaaggccgggctggtcgccatcgcgcatgacgcgcaacgtacccaggccggcaatgacgagccggatttcaatcgccatagctgcggcagtttcttcatgaacccgattctgacgatcgagcagacggccgcccttcccgaagatgcgcctcgtttcgacgcgaccctgccggacggcgagccgggcgtcaagacctccgccgcatggctcatcgatcacgccggattccacaagggcttcaaaaccgccgcgaccgcgaccgctggcctgtccacgttgcacacgctggcgctgaccaatcggggtggcgccagcgcggccgacatcgccgacctcgccaaaaccgtgcaggatggcgtcgaagcggcttacggcatccgcttggtacccgaaccggtcgtcatcggcatggatctcaagtgacgccaatgtgacggtatcgttctatacttgccccttgtcgagagcggccggaatgaccggccgtatggaggaaggggattgcggtgaacgtattccgtaagaaatccgtcgagcaaaccattgcggaaacaggcgagtcggggcgttccctcaaacgtgacctcacttggtgggatttggccatcatgggcgtggccgtggccgtcggagcgggcatcttctccatcggagcccaggctgcggctttccacgccggaccggccgtgatcatcagcttcctgatcgcgggcatcgtgtgcggtgcggccgtaatgtgctatgccgaattcgcatcgatgattccggtggcaggttccgcctacaccttcacctataccacggtgggtgagatcatcgcgtgggtgatcggttgggatctgattctggaaatgctcatggcgggctccgtcgtctccaaatactggggcgtgtacctgaatgacttcttccggttgatcggctggaacatcaataccaacatcgccatcggatcgttcaacttcgacgtggcgccgctgatcatcgtagccttcttcaccgcgctgctcgtgctcggcaccaagatcggcgcccgcgtggatggggcgctgaccgtgctgaagatcgccatcgtactgtttgtggtggtcgtcggattcttctatatcaaggccgacaacttcactccgttcatcccgccgagcaagcccgccgcatcctctgattccggcgtgagcgccgtgatgaaccagccgttgtggcagtgggccaccggcatgaccccgagcatctatggcgtggccggcatcatttccggcgcggcgctcgtgttcttcgccttcctcggtttcgacgtggtcgccaccacgtccgaagaggccgttaacccgaaacgaaacgtaccgttgggcatcggcgtgggcatgggcctgatcatcgtgctgtacacgctcgtcgccatcgtcaccacaggcatggtctcctataaggatctcgccaagcaggcgagtccgtcgctggccaccgccttcgaaatggtcggtgccaactgggccgccaaaatcatcagcttcggcatcgtgatcggtctggccaccgtggtgatggtgctgctgctggggcttacgcgcgtggtgttcgccatgagccgtgacggcttgctgccgcgtggattgagccataccggcaagcatggcactccggtccgtctgcaggtcatcgtgggcgtggtcatggcactgatcgccgcatgctccgacgtcgacgtgcttgccgacatggtgaatatcggcacgttgtcggcgtttacgctggtcgcgatttccgttccgatcatgcgcagaaagcgtcccgatctgaaacgtacgttcaggatgcccggcaatccgtggattccgattctcattgcactcgccaatgtgtggctgatgctcaacctgagtgtgctcacctggatccgtttcgtggtatggcttctggtcggtttcgccatctatttcggctacggctaccgtcatgcctgtctcggcaccggcgaattggatgttgcccgagagcaagagtagtctggaacagtcaagtttgtaaggaggtaaccatgccgtacgtgatcgctcagccttgcgtcgatgtcaaagacaaggcatgtgtggatgaatgcccggttgattgcatctatgagggttcccgctccctgtacatcaatccgaatgagtgcgtggattgcggcgcatgcgagccggtgtgcccgaccgaggccattttctatgaggatgatctgcccgacgagtgggcttggtacaaggatgccgccgtcagcttcttcgccgaggtcggcgatctgggcggcgcttccgcagcgggtccgatcggtaaggatcccgaacaggtggcggcactgccccctcagaatcagtgagactttccgtctccatttgctttgtcgaaggccgtcacgtcgagtggcggcctttcgtcgtatgctggaacgagtatcgcagcgcactgacgtaaggagttccacggatgggttttcatgagttttcatcaccgtacgattggtcacggatcgcctccttcaagcgtacggcgaaggccgcattcggtggcatggtcgacttgtccgtaggctcgccggtcgacccagtgccggattcggtgcgcaaggcgcttggcgcggcttcaaacgatccgaacgcctacggatacccggtcaccgccggcaccgccgatctgcgttccgccatcgccgaatggttcgcggcggcgcgcaatgtcgatctgacggcgattgatgcggacgtggtgccgaccgtcggctccaaggagggggtggcgctgatggcctccctgctgcacttgggtgtgggtgacgtggtggtgcagccgaaggtctcctacccgacttatgagattggcacccagttggccggtgccaaagtgctcaaggtcgatgacgtggccgatgtggaatcctggaaggatgtgccgggcgtcaaggccatatgggtgaactcgccatgcaatccgaccggtgcggtgcttgccgccgagcagatggccgcaatcgtggcggccgcgcgtggcatcggggccgtggtgctttccgacgaatgctatgcgttgatgcagtggggaaacgtggatgtcgaagcggatgcggacactctcgcatccacgccatgcgccctgcgcccggatgtgtgcggcggctccgcgcaaggcgtgcttgtgttgtattccttgagcaagcagtccaatatggccggctatcgtacggcgttcattgccggtgacaagtcgttgatcgtaccgatgaccgcgtatcgcaagcagatcgggcagatcattcccggaccggtacaggctgccatggccgtgggacttcgcgatctggagtcggtcaaagcgcagcgcaaacggtatgcgaatcgtctcggcatattggtgagtgcgttgcgcgcctacgggtactgcaccgatatgcccgacggggccttgtacgtgtgggtgaaggccaagtccggcgactgttggaaagacatggagcaacttgcccggatcggcatcatcgcgagtcccggcgaattctatggggctccggaatatttgcggttctccgccaccgccggtgacgccgccatcgctgacgccgccgaacgtctggcccgctagatgccgaaactggcgatgtcgtcgccgtatttgcgccggaccgcgtccagcgcctgctcggctccacgcaggcgttcggttttcggctccttcctgcgggtgtcgcaatcctgcgccgtgtcttcttcctccagcaggtcctccagcgacggctgaatgatggcggaaccggcttcgaccagtccgctggcgctcatgccggccaaacgtatcggacggggcaacgaaatcgcatgcgccgagccggactccatgcccatcatccgcaacagcaggtcgacgcattgcggatacagcacgctcgccatatccgtcggccgttccatggtgcgtcccttcgtggtgtagctcaaatccggaaagcgcagcttcaccatcaccttgcgtgccatcagtctgcgccgacgcaacgtgctcgccacctcatcgcagcaatgccgcaacatcgaacatacctgccgcatatcctgcgtatccgtgtcgaacgtacgctccgagcctatcgacttttccggtgtgtacagcgtgaccgggcggtcatccaaaccatgtgacgccatatacagcccgtgcgcggcaatcgtcgaacccgtggcctcggccaaggtcgtttcatccatcctcgccacatcggcaaccgaattgatgccccacgtacgtagccgtcgttcgagtgatggcccgatacccggaatgccacgcagcggcatcatctgcacgaattcggcatgccgggccaggggaatcatcagcatgccgttcggtttggcgttcgtcgacgccattttcgcaaccagtttgttcgccgcgataccgacggaacaggtcacgtggtagcgtgcggcgacctgttcgcgaatccacgcgccgattgcggaagcggtgcgccagcgtagcagtgcgccggaaacgtccatatagcattcatccaccgacacctgttcgatccgatcggtgattcgactgaacacctcggtgaagatacgtcgtgacatcgcgcggtaatactgcatgtcgaccggcaggaaaatgccgttcgggcacaattgatgcgctcgcgagctcgccatggccgaattgatgccgtatgcgcgcgcctcatagctggccgccgacaccaccgaccggttgccggtgccgatgatgaccggcttgcccgcatattccgggtgccgtgccacttccagtgaggcgtagaaggcgtccatgtcgatatgcagcaccgtacagccggtctcgtcgtgaccccagtcacgtttggccgctgcgattcgtggtgccgtgctcatggttccatgataggcgatttccgccgctgattgaaacagatgttcgaatatggtgtgatcgtcacatcgcgttgcgttgcgtgtcgttgtttgaccgttccgtgagtacgctggtgcctcgtgaagagagtcatcatgacggcgctgaaccgtctaccgatcgtcgtcatcgccatttgcgaagcagtgatgatctataccgccaccggcgtggccaaagtggcgttcacccaattggacgcagtgtacgccgcatggtaccgcgtcggtttcatggccctgatgctactggcctggcgtaagccttggaaggccgacaggcgcgattcattgccgggaacccgcagggactggaccctgctggcgggtttcggcgcggctttggtgttgatgaacaccatgtattatgtggcgatcagcaatatggatatcggcatcgccaccgccatcgaattcatcggacctcttggcgtggccgtcatcaccgggcatagttggcgcgagcgcgtcggcatcggcattgcggcctgtggcgtggtgctgctggccggcatctcgcttggcggcgagaacggcggcagcttcctgatcggcctgatcgccattctgatcggcggttccatgtggggctgctatatcgtgctcggaggcaaagtcgcgaccaagggtcatccaatcgacatgctgtgctggggtaccgtgcttggttggctgatgcagtcggtgttcctggctccgggcgccatcgcccatctggccaggcccaaggccgacgcgacctgggtgcacgcctcgtggggcgttgcggcgttgctggcattgctgttcctggtgtcgctgttcggttcgttcctgccgtatctgaccgatcaggtggtgatgcgacgcattccgtccgcacgctattccgtggtgcagtccatcaatcccgccatggccacgttcatcgccctcgctttcggtgaggtcccgacattgggggagtgtgcaggcatcgcattggtgattgtggcggtgatcgtcacgttctccggagatgagaatcccgcgtagaggccgggtcgtcagatggtcgcgggccaatttttcgtgccgatgtggcgtcagtgtgcgtctcgtgtcgtgcgaaatcacgccaacggcttacgatttttccggtttctggtgttttgcctccagatagatgctatagttacatgctgttgcgtcgtgacaacgtcacagtcgcaacagtggagtcatgcctgagtggccgataggggcaccctgctaaggtgttagtcgtgtttagcggctcgagggttcgaatccctctgactccgccatgagggttttcggagcaatccggaagcccttttttcatgccaaaacggcggaatatcaacgttttcaggctatggaacgcaagtggtgaccgtccgtcgcattccaccgaagtcaacgtttcaggtacctcaacaccgcggttcgccgcgcttttcgatattcttgaacaagagagaatatcgaagaagaagggtacggccatgcgtatcagaaaagatgccttgcatgcatccaatccggaattgctgacagccggcaggcgcaggatcgcaatggttgcggcaatcatcatcatcgccgtgttggcggtcggagggtggttcgtagtacagcaggtgcgctcgcaggagacgactcatgtggcggatccggcaacgacgtccacacggcaatcgcaggcaaaggcgacggcgaagcagaccgaggcgacggaacatcacggcaactccccggattgcccggatacggactgcatcgccatgctcgtcaacggcgacctgctgttccatgaggggctgtggaataattttgcgagtgccaacaccgcggccaccgatggcacggccttcgatttcaccagcctgtttgagccgatgcgtaaatatatcgatgcctccgacatcgcggtgtgcgagtttgagaccccgatcgcccaacgcggcggtccgtataccggctatccggtgttcaacattccgccggaggtcgccgatgccgccaagaacgtcggctatcgtgcctgcacgcatgcgtcgaaccattcatgggaccagggtgctgatggcatctcgcgcctgtgggacaccttggaggccgacggcatcgcgcagaccggctcttacaagaccgaagaggattccaccaagccgctcgtcatcgactcgccgaccggtggcggcaaactcggcctgatctcgggaacggtgtcgttgaatgcgcagactcctgatttcgattggcgtgtcgatcggttgcgtgaggcgagcgatcccaatcatcaggccgatatcgacaaagccgtggccaaggcgaaggccgcgcgcgaacagggagccgacgtggtggccatcgccatgcactcggtgcaggagtatctggactatgccgattcgtggcaacagtccgaagcgcatgaactggccgataccggtgcattcgacgtgatctacggcgccggatgccactgcgcacagcccatcgagaactacaacggcacctggatcatctacggcctgggcaatgcggtgaccgtgacctcctacattcccggcaacgaggtcaacaatcagggtgtgaccgcccgcgtgcagttcgccggcaagaaaggcgtggccggttcctggcgcgtcagccgcatcgactggattccgaccgccaacatgcggcaggggcagtaccagtggtgctcgctcgccagcgaccatcccgacggcacatgctggaacgacgccgaggatgcgaaccaacggcaacgcatatggaacgtcatctactccatgggagccgaccagaacgttgtacgggaatggaacatcaccacggagcagacgacttcttccgggaaatagcattgtgacagaatatgccacgtaatcgtaacgtcgtcatcgtaatgtcgccgtaagttgcgtggaaaggaaccatatatggtcgaaatcgttgagacccagccggaacgcaccgatctgccgctggtcgtcatgccggtggtcgttgcatccatgatcgaaccgttcaagcggtgtttcggactgctggaaaatgttgcacgagtgcgcatgtatgaggatttcacattggatgaggacaccatcgtggcccgttgcgacggagccgacgccgttatggtgatcggcttccactgcaccgactcgattctcgaacgcacccatgccaagtgctacgcgtttggcggcactggcgtggccagctacatcaatcttgagaaggccaaggcgcaaggcatccgtgtctgcaatgtggtgcattacggcgaccatgccgtcgccgaacacaccatggcattgctgatggagctcacacgtcatgtcggacagcttgaccgcgaggtcaaggcgggcgactgggccggcaacgacggctacgaactgttcggcaagaagctcggcatcatcggcctcggcggcatcggccagactgtggcccgtatcgcaaacgcctacggcatgaaggtctccgcatggaactcgcatgtgcccgaacaggtgcttaccgactgcaacgtcactccggtcgacgacatgaacgagctgatcgccggcagcgacgtcgtgtccatccacatgccgctgctcgactctacgcgcggcatcatcaccgccgaaaacctcgaggcgttaaggcccggcaccttgttcgtcaacacggcacgcgccgaaatcctcgaacccggagcactgctcaagcgtctggaacgcggcgatattcccgccgcactcgacgtattcgagcatgagcctctcggcgccgatgacccgctgtgccggattcccggcatcgtgctcaccccgcacaccgcatggcgtaccgatggcgcatacgtcggcatcaccgagcaggtcgtgcagtccgtcgccgcattcttcaggggcgaggatttcaacgtcgtcgtctgatcgtcaggtcggctgaatcgggtaggttgaaggcatgcagaccatacttgattccgccgatcggccggcgcatgacgcgttcgtcgaaaagaagtcggaattcatcggtgacgcctgtcatatcgattcgttggatgatgcgctcgccttcgtcgcaatgattcgtgagaagcatccgaaggcccgtcatgttgcctatgccgcggtctgcggcggttccgacggtcgtcttgcggaacggatgagtgatgacggtgagccgtccggcaccgcaggcaagccgattctcgatgtgctgcgcgccaatgagatgaccgactgcgtggttgccgtcactcgctatttcggcggaatcctgctcggctcgggcgggcttatccgagcctattcgaccggcgcgtccattgcggtgaaagcggcgagcaaggcgaggatcgtaccgtgcggggaataccggatagtgctggattacccgcagctcggcagcttccagaatctgctggcgtcagtgcagggcgagcaggtcgacgcgcagtatacggatcgcatcgcaatgcgtgcgatcgtaccgcaggagcatgccgcgacctttgaatcccgcatgattgagacgttcaacgcggccgtcacgccggaattggtcggtacgaccaaccgtccggtcaagctgtgagcgttcgattacggtatggcgtaaggtgaagactatgactgatgccgagaacatcgaacatgccgagcatgccggaaacgacaccgccgaacgggcggatgtgcaggcggttcccgccgatttcgaaccgttgaccgccacgtatgagcgtcttcgccactccaccgatgccgccgagctgagcgaattcgcccgacgtccgttgccggaccgtgccgaacaggccgcattctcgcgtgccaccgcactgctggaggccgtggccggcaatccgcatactccgttggaggatcgcatcttcctggccgaaaccatgccgttcccgaacattctggtcaaactgtccaccgacgcatccgttgaggtgcgcaaggccgtggcgggcaacgccgatgacaagaactggctggtaggccgcctcaccaaggacgaatccgcggaggtgagggacatcgccttgcggaacaagcgcacatcttggaagatgcgccttgaaggggcgcaggatccgaacatggatacgcaaacccttgactttctcggcgcgctcggcaccgaactcgagccgaaagcccctgcggtattggcttccatggtgcgtagggcagtggcgctcaacccgaacacgtctccggcgatgctcgccaagcttgccgaagatccctccggagaggtggtccgggccgcgcaatcgcgtcgtgcatgacgaatcgtattgaatacgttgtcatttcgtgaggaaagtacgcgtggcgcacgttgaaaggttctagactgttgcttatgacagaacagaccgaaaacgcaacgcgtctcgcccggccgctcattcgtctggccaagttggtcggcgtcgccaccagctatgtgggcatgagccatgattaccatgaaatcgaagacgatgttctggtggcggtgctcaaggcgcttggtatcgacgcttccaacgatggggcgatcgaacagtccatggaatccattcttcgcgaccgccgttcacggctggtggcacccacggtgctgcacacggtgggcaagccgagcaaggtgctggtcaacgtcggcgtcctcgaggcgccgcaggccagcatcacgttggaggatggcagtgaattcgcggggaagatcgcctatggtgccggtgacggctccatccatgagattgacgacacgttcgtctccacttcttcggtgatattgccggagggcctaccggccggataccataccctgcatgtacgggtgggggagcgcacccaggatgcaaccgttatcagcgctccggaaaagatcgaactgctcgatgacatgaaggaaggctccctgtggggttggatgagtcagctgtactccatccgttccaacggctcttggggcgtgggcgactatgaggatctcaagaccctgttggtcgaatccaagagaaggaccggtgccgacttcatgctcatcaatccgatgcatgccgccgaaccggtgccgccgttgacgccgtcgccgtacctgccgatctcccgtcgcttcatcaacttcagctacattcgcccggaatccgtgccggaatatgccacgctgaaccctgatggcaagaagcaggtcgacgagttgcatgcgcgtgtcgaaccgctcaacggcgatgcgcaggtcatcgaccgcgacgccatgtggcgggccaagatgcacgcgttgtggatcatcttcacatccggacgtaccgccgaacgtcaggcgcagttcaaggaatacctggccggttgcggcgacgagctcgaatcctatgccacgtggtgcctgtgctacgacaaatggggcgcgcccaatggcaggcccgacaattgggagcgtatgttcaaccgcgattccgtcgagattcgggaattgtgcgaccggttccccgatacgctcgagttctaccgctggctcgaatgggtggccaccgagcagcttcatgcggcgcagcaggccgcacgcgaggccggcatgaagatcggcatcgtcgccgacatggccgtgggcgtgcatccgtccggctccgacgtgtggtggaatccggaacgtttcgccaagggtgccacggtcggcgccccgccggacatgttcaaccagcagggccaggattggagccagccgccattgaacccgatcgctctggagcgaaccggctacaaagtgtaccgggacatggtgcatggcatgttcgccaatgccggtgccgtgcgcatcgaccatattctcggtctgttccgtttgtggtggattccggaaggcaagaaggccaccgacggcacctacgtgtactacgattccgacgtcatgcttggcgtattggcgcttgaggcttcgcgcgccggtggcgtggtggtaggcgaggacctcggcgtggtgccgccgtatgtgtccaagtcgctgtccgcgcatggcattcttggctgtgccgtggaatggttcgagcagttcgatggcgagttccgtgcgccgcatgattggcgcccgtatgcattggcctccgtcaacacgcacgacatgccgccggcggccggctatctcgaatacggccacgtcaagctacgtgagcagctgggcctgctgtccgggccggtggaggaattccaggcctccgcgaccgccgagcacaacgccatgctgaacatgctcgtcgaggaggggtatctcgacaaggcggccctgcgggatgagctcgccaacgaaaacgagatcgtcgatgcgctgtaccgcgggctcaagggctcgccatgcaagctcatggccgcctccatcgtcgatgcggtcggcgaaaagcgtacgcagaaccagccgggcacgaacaacgagtatccgaactggcgtatcccgttggctgacggcaagggcaatctcgtgcccttggaagagttgttcgaccaaccgcgtcttcaggagattgccgccatcatgcgcggctgattccggacgggtcgggcatggggtgtccgccggtgcgatgccggtgggcaccccttgcatttcgtgttgccgaatgtcaaggctggcgatacactagtagattgttgtgtttccctacggggtccttcaaagcgcttttcccactcgccatcgaggactttcagggagcccacggataatgagacccgaaaacggcaccattgcaacgcctaaccaacgttcggcgcggtcggagggtccggaacacaatatatagaaaaggtacatcgtgaaaactttcactccgaagccagctgatctgactcacgactggtacatcatcgacgccaccgacgtggtgctcggccgtctttcctcccaggcagccatcctgctgcgtggcaagaacaagccgacctacgctccgcacgccgattccggtaaccacgtgatcatcatcaatgccgacaagatcgctctgaccggcaacaagatgggcaaggaactgtacaagcactccggtcgtccgggtggtctgcgtcgcgatagctacgccgaacttctggaaaaggatcctgagcgcatcatccgttccgctatcaagggcatgctgccgaagaaccgtctggccaaggtgcagctgggtcgcctgcgcatcttccgtggtgccgagcatccgcacaccgcacagcagccgcaggttttcgagatcgctcaggtctcgcagcaggctaagtgaaccgaagggagataagaaacatggctgaaaacaccaacaactccgcggttctcgagaccgaagaggagctcacctcgtacaccaccgaaaccaacgctggcgctggcaccggcacttccgccatcgctccgggctacggcaccggtcgtcgcaaggaagccgtcgctcgcgttcgtctggttccgggcaccggcaagtggaccatcaacggtcgcaccctggaagagtacttcccggccaagctgctgcagcgtgaggtcaactccccgatcgttctgctcaagctcgaaggcaagttcgacgctatcgtcctcgttgatggtggcggcaccaccggtcaggccggtgcaatccgcctgggcgttgcccgcgcgctgaacgccatcgatcgtgatgcgaaccgcgccaccctgaagaaggctggcttcctgacccgcgacgcccgcgtcgtggaacgcaagaaggccggtctgcacaaggctcgtcgcgctccgcagttctcgaagcgctaaagctttacggcttgtacgaagcccctcgaaggattcgttccttcgaggggcttcctcgttatgagtgcggtcagtcggcggatatctgccgcatcacgctgatgctcaacgccggaatcgtccatagggtcggatcatcagcgccttcggcatcatagatgtcttcgggcacggctccgtcgttcacgtcggcatgccagtacatcatgttcagacgatgcagatgatcgctgaaacgacccgccggcttgttttccgattcctcattcagttcggccacacggtccaccgacgtaccttggccggggtattctcctgaaacttcggcggaggaccacaccatttcccattccttgtcggccggcagatggaaacgggagatttcgtcggaaccgttgatcagaatcatcaggcccgatccatcgggagagagcagctgcatggcaaaggtgcgtaccgctggattcgtccaatcggcgtcatgtggggcatggccgctcggcaggaaccagtgcacacgatcggaacgcttgagcagtccgattttgctcaatctggtgaagaaatcctcatgatcatacagatcgcgggatttgcgcaacgcaatcagacgcgacaccagatcgaactgcttgagttccggcgtctgctcggtgctgtacaaccagtcccaatccagccatgtggtcggattgtcttgcatgtaggcattgttattgccgttctgcgaattaccgaattcgtctccggagagcaacatcggcgtgcccaacgacagtagcagcatgccgagcatgttcgccatggcccgttcgcgctgctgaatgatgatggggtcgtcgctggggccctcataaccgaaattgaccgaatgattgtcgttcgtaccgtcgcggttgtcttcgccgttgcgctcattatgcttgtggcggtagcgcgtaagatcggccatggtaaaaccgtcatggcaggccacgtaattcacggatgcggtcgagccacgtccgggatcggtggcgaataggtcggccgaaccgcacagacgagtggccatctcctgcatggtcaccacgccggattcgccgcctcgattacgttccacatcggtcagccagaacttgcgtgtggtatcgcggaaccggtcgttccattcggcgaacggaatgccgaactggccggtgcgccaacctcccggaccgacgtcccaaggttccatgatcatcttcagattgcccagcagcatgtcggagcgcagggcgtacaggaacgggtggtaactggtgaaatcgccgtcgagacgggccaacgtggccgccaggtcgaagcggaagccgtcgatgccgatgcgtttggcccagtagcgcagggaatccaccgcgaaggtgacgacatgcgtgttggtgaagtcgagcgtattgccgcatccggtggtgtcgtacaggcgactgatcttctccttgttgcgcctgtagtaggagaggttgtcgagaccccgccagcagatggtggggccttccggaccggattcgcaggtgtggttgtagaccacgtccatgatcacttcgaagcccgcttcgtgcagtgcgcgcaccatgtcgatgacctctttgcgaacggcggccgctcccgcctcctgcgcggccctagtggcgtacgagggctccggggcgaagtatcccaatgtggaatagccccaataattggtacggccgcgttcctgcaggaacagttccggttgcttggcctgaatcggcatcaattcgatggaggtcacgcccagatcctgcagataggagagcgtcgaggggtgggccaggcccgcataggtgccgcgtagctctttcggcaaccatggtgcgttggcggtgaaacccttgacgtgcagctcatagatgacggttttgctccaagccacatgcggatgcgagggctcgccctcatgtttgttcgcatcgcgatcgtcgatggccacggaaaccggcatatggcccagtgagtcaacggtgctcatcgggccgaacggcgaacctttgaccttgccgttcatgatttcgcatgcataggcgaatgcacccggattaagtttcatcgagccatcgatgccttttgcataagggtcgagcagcagcttgtatggattgaagctcacgccgtggttcgggtcccatgggccgttcacgcggtagccgtaatgcatgccgtcccatgccttgggtatgtgcacgtaccataagccgtaattcgggccgtccatcatgaacagcgtctcccgcagattgagcgaggggatgcgtctggtacagatcttctgcgattgcgcctgttcgatgaacgagatgtccggctcgttgaacaggcgtaccgcttcggcgtagaaggcactgggttggtcgaggggttcaagcacgcagaaccacacctgatccgccgtttcggaacggactactgcgtccgcgccaccatcgtcggtgaagtagagaccaggtcgggttgcgtaacgatgcaagggtgggtttctcatagacctattgtaagcgacgacagtcgtcaaacatttgacgaaaggggtatgtctgtcacatcgttacgcacctcggcgttcgggcttgcgtgctcgtcggaaaacggctgaatgccggtggtgtgcattggtcgagaaactgcgacacactttataaataactttatgaaaagaaatttgcaaaacaatttaaaaaagcgtatagtcatgggctatcaggcggaacaatctgtcggacatcactttcaaggtggaaaggaacaatcatgaaggctctggtacttaccggcgtcaaggaattcgagattcaagatctggccactcccgagatactgccgaatgaggtgctgatcaacaccgcatatgcgggtgtgtgcggtaccgatcacgatctgtatgcgggccgtcctggctccgccgcagccgtgccgccgatcgtgctggggcatgagaactcgggcgtcgttgccgcgatcggtgctgaggtcaccaacgtcaaggtcggcgatcgggtggccgtcgatccgaacatctactgcggtcaatgcgagtactgccttactcagcgtccggaactgtgtgaccatctgagcgccgtcggcgtcacccgtgacggtggtctggccgagcagttcaccgctccggccaccgtggtctatgcgctgcccgacaatgtctccctgcgcgacgccgccgccatcgagcccgtttcctgtgcggtgcatggccttgatttgctcaagcttcacccgtaccagaaggctttggtcatcggtgacggcttcatggggcagattttcgctcagctgctgcaggcctacggtgtgcatcgggtcgacctggcgggcatcttcgacgagaagttggaacgcaacaagtcgcagttcggcgttaccgaaacctacaatacgacccgtgagcagattccgtccgaggcctatgacgtcatcatcgaggccgttggacttccggcaacgcaggcgcaggccatcagtgccgcgaagaagggagcccaagtgctgatgttcggtgtcggcccgcaggaagcccatttcgaaatgaacacctatgacatctacaagaagcagttgaccatccaagggtccttcattaacccgttgacgttccgtgacgccatctcgctggtgtcttcgggcaagatgaacatcggcggactgatcagccatgagctcgggctcgaagaggtgcaggatttcctcgatggcaagatttgcggcgtttccaaggccgtcgtcgcaatcggcgactgacctcataaaggggtatggctcccggatgatcgggcatggccgccgtgtatcctctgctgcgacggccatcgctaccccacctacaagattgggggatacggcgatgaggccgtggctccccatccaaacccttaatgacgattcggacgatttcctcaatgttgcatggaaatcgagtaaaggtgctcacatgatcggtattcttgaacgactgggcgttcctcgttcgttgatgcttggttttcttgccgtcgcaatctttatgaccggtgatggtttcgaactgacgttcctgtcgaaattcatggtggaccagggattcgccgcatcccaggcctcactgttagtgactatatatggcctgttcgcggcgctcggtggatggtccgccggtgtgctggccgagatgttcggtgcgcgcagggtcatgctgttcggtgcatgctggtggatcggtatccatctgctgttcctcggcgttgccatccccagccacgtctacctgttgatcctcggtctgtatgcgttgcgaggcatcgggtacccgctgttcatctacagcttcgtagtgttgatggcgcaatacatctccccggccaggctggcttcggccacaggcttcttctggacctgcttctccctgggcatcggcgtgttcggtgcctatctgccaagtttcatcatgccggttttcggcgaatataagaccttctggttcgcattgcccttctccgtcgtcggcacggtcatgtgcttcttcttcgtgccgaagaataagatcgtcaaaggtgagggcttgagccgcaaggagcagctgaaggaactgaccgaaggcgccaccatccttgtcacgaatcgcaagatcctcatctgcgccatcatccgcatcatcaacaatctgctgctatacggcttcccggtcatcatgccgctgtacctgtgcaccgcgcacaacggtggcatcaacatcttcaaaaccgaggaatggatgcgcatctggggattcgtattcgtggtcacactgatcttcaacaccttctggggttggttcatggaccgtttcggctgggtgtggccgatgcgttggttcgggtgtgcggtgctcgccgtcggttccgtggccttctattacataccgcaatggttcggtgcgaatgcgttgatgatgatcgtcgcggcgatcatcatcggtatcggtacctgcgccttctcgtcgcttccgaccatcatgacgttgtatgccggcgaaggcaagcagggcgcggctctttccgcatacaatcttgccgcaggcctcaccacattcgcaggccccggcattgcgacgatattgttgccgaccatcggctatggcggtgtttgctggacctatgccgcgctctacgtgctggcattcgtgctgacgctgtgtatccgcccgaagcagcccggcttcgacggccacgggcatcgcatcagacatacggcttcgccaagggtcctcgtggaagagatcgagaaagtcgcacaggccgccgcctgattcgccgatcaggcggcgtggccgcaaatctcgtcgatgaagatttgcacgaaacgcaatgccgcaccgatttcgttctggttgtccaggcacagactcttacgtagcgtgaaatgatcggtgtggaaagcgctgcgttcctcgacgagtcttttaagggtggtgacatcgtcatcgtcgagatagtgcgcggcttcgccgccgatgatgatatcgccggccaacatggatcgaatgttgcggatggcttgcgccacgttgccaagccatccgttaaaccgttgccggtgctcctgttcaccctgttcaagtacgctgaagaagccggataggctttcgccgtcttcggtcagggcctcgggggagcagtagacatccatgcaaccgcgctgcccgcagtagcattcacctccatccggcaccagcgtcatatgctcaatggtgccattgcagagattcggcccttggtagagttggccgtcaacgatgacggctccgcccggacgcatttcgagatacacgcatacggcatcggtgagcgaatggtcaaaccacagttcggccatggccgcggcatcggaatcgtggatcatgatgcatggaaacttcacgttttgcgcgatgacgtcaagccgaagtccggtattgcccatgatattgccgaaggtgatggtctgtccgtccgcggagacgatgccttggatgctgaaagccacaccgagaacgttgtcgtcgttcctctcgacgcctgcggcgaaagcgttgatgatgacgcccatctgttggtagtagatgtcggtgttgtggtagggcaggagcttgaacttgcgcgagatgacgttgccgccaaggtcgaccgcgcacagagtcaacccgttggcacgcatggtcacgccgattgcgatcttcgccctgcagacgaaggcgaaggtctgtgccttacgtccgccggtggattcgagttgctcgcctttacggatgaggccttcgacttccagcgtgcgtagattctgtgtgatggtgggcagactcaggttcagttcgcgttccagcatctgctttgtggcagggcctttggaatacaggtacgccgtgatggcgcgtttgttgagttccttgacggatgcgggaggcgtcgtcttcatcattgagctccattcgtattccatgatgcaaagtctgggaattattctactttagaaaagtgttttcaagaagttgtggtgttttgtataaaaaaataaatagcttttcaaaaagttactcggaaaaacattgttcgtgtgtgtgtaatagatggatatttcgaacaaaacataacaaaatagttgattttagcgttggtgtgtgcatttcaagcgacaaaataaacataaatagcaaagaattgaacatcaagcgcacgacacgacgcgtactatacaagcgcggataacttaggtagattgtgactcaggtcacaacggtgcccggtaatgtatccgtccgatacggatggatgaggaataaacgaataccgctttgcaaacccaagaatcgaggaggacttcaagtggcagacgcaaagaagaaggaagagccgaccaagccgactccggaggagaagctcgccgcagctcaggccgaggtcgatgagctggtgaataagggcctgaaggcgctcgacgaattcgagaaactcgatcagaagcaggtcgaccgcatcgtcgccaaggcctccgtcgccgccttgaacaagcatctggtgctcgccaagatggccgttgaggaaaccggccgtggtctggtcgaagacaaggccaccaagaacatcttcgcgtgcgagcatgtcaccaactatctggctggacagcgcaccgtcggcatcatccgcgaagacgacgtgatgggcatcgacgagatcgccgaaccggtcggcgtcgtcgccggcgtgactccggtcaccaatccgacctccaccgccatcttcaagtccctgatcgcgctcaagacccgttgtccgatcgtcttcggcttccacccgggcgcgcagaactgctccgtggccgccgcgaagatcgtgcgcgacgccgccatcgaggctggtgctccggagaactgtatccagtggatcgagcatccgtccatcgaggccaccggcgccctgatgaagcatgacggcatcgcaaccatcctcgccaccggcggtccgggcatggtcaaggccgcttattcctccggcaagccggcccttggcgtcggtgccggcaacgctccggcctacatcgacaggaacgtggacgtggtgcgtgccgccaacgacctgattctgtccaagcatttcgactatggcatgatctgcgccaccgagcaggccatcatcgccgataaggagatctacgctccgctcatcaaggagatgaagcgtcgcaaggcctacttcgtgaacgatgaggagaaggccaagctcgagcagtacatgttcggctgcacctcctattccggccagaccccgaagctcaactccgtggtaccgggcaagtctccgcagtacatcgccaaggccgcaggcttcgacattccggaagacgtcaccatcctcgccgccgagtgcaaggaggtcggcgagaacgaaccgctcaccatggagaagctcgctccggtgcaggcggtgctgaagtccgaaaacaaggaacagggcttcgagatgtgcgaagccatgctcaagcatggcgcaggccacaccgcggccatccacaccaacgatcaggccctggtacgcgaatacggccagcgcatgcacgcatgccgcatcatctggaactccccgagctcccttggcggcgtgggcgacatctacaacgccatcgcaccgtccctgaccttgggttgcggctcctacggcggcaactccgtgtccggcaacgttcaggcagtcaatcttctcaacatcaagcgcatcgctcggaggaacaacaacatgcagtggttcaagattccggccaagacctacttcgagccgaacgccatcaagtatctgcgcgacatgtacggcatcgaaaaggccgtcatcgtgtgcgacaaggtcatggagcagcttggcgtggtcgacaagatcatcgaccagctgcgcgcacgttccaaccgcgtgaccttccgcatcatcgattacgtcgagccggagccgagcgtcgaaaccgtcgaacgcggtgccgccatgatgcgcgaggagttcgaaccggacaccatcatcgccgtcggcggtggttccccgatggacgcctccaagatcatgtggctgctgtacgagcacccggagatctccttctccgacgtgcgcgagaagttcttcgacatccgtaagcgcgccttcaagattccgccgctgggcaagaaggccaagctcgtgtgcatcccgacctcgtccggcaccggttccgaagtcacgccgttcgccgtgattaccgaccacaagaccggctacaagtacccgatcaccgattatgcgctgaccccgtccgttgccatcgtcgatccggtgctggcccgcacccagccgcgcaagctggcttccgacgctggcttcgacgcgctgacccactccttcgaggccttcgtgtccgtctatgccaacgatttcaccgatggcatggcactgcacgcagccaagctgatctgggacaatctggccgaatccgtcaacggcgagccgggcgaagacaagatcaaggctcaggaaaagatgcacaacgccgccaccatggcgggcatggccttcggctccgccttcctcggcatgtgccatggcatggcccacaccatcggtgccctgtgccacgtggcccacggccgtaccaactccatcctcctgccgtatgtgatccgttacaacggttccattccggaggagccgaccagctggccgaagtacaacaagtacatcgctccggaacgctaccaggaaatcgccaagaaccttggtatcaatccgggcaagaccccggccgaaggtgtcgagaacctggccaaggccgtcgaggactaccgcgacaacaagctcggtatgaacaagagcttccaggaatgcggcgtggacgaggattacttctggtccgttctcgatcagatcggcatgcgcgcctacgaagaccagtgcgctccggcgaacccgcgtatcccgcagatcgaggatatgaaggacatcgccatcgccgcctactacggcgtcagccaggaggagggccacaagctgcgcgtccagcgtcagggcgaggccgccacggaggaagcctccgagcgcgtgtgaggtccgcgtgaagcgcaccgtatatatggaccacagcacgtccatgtatatataaggagtaatccgtaaggagcccggtcgggaacggtcccgccgggctccttggcattgccacggtcttccgtgatgatgggtatccgccgacagcatggattcccggcgagagcgatatggcgtggctttgagcgtaatggggctggatttcactgttgttttttcgtagcgtagtggaatgaccgatatttcgaatcaacgacctgcgcaatcacgaagacgcggaggattgcgcttatggctccccgggcagccgggtgcgctcatgatggtgctttccccggccgttgcgggaatcgtggccgcatgggcgtaccgtggattcgcgtggacgccttggtggttgctcatctgctggctgttgtgctactgcgtgcagttttccgccgcgcgttggttcaaatcgcatggtgcccaccgctggatgctgcagccattggtgtactgcatcgtgctttgcgcggtcggtctgccgtttgtggtgctgcatccggggattctcgcttgggctccgccgtttgcggtgcttgccgcgatttcgttccgtgcctcgtgggtgcgcaaggagcgttcgctatggtcgaacgccgcggcggtgtcggcctcctgcctgatgccgatgctgacgttctgctatggcgtcgatacgcctgacattccgtatctcagcatacccgggatatcgttgttccttacgtttttcatggtgcagttcggctcggtgctgtttgtcaagacgatgattcgcgagcgggggagaaggtcgtacatcgtggcctcctggatttggcatgccgtcatgctggcatggtggaccttcgtcggtaacggatatctgatcgcattggcggcgatgctgctcatacgggccgtcgccctgccgatgattgcacgtcggcgtacggtcaggccgttggccgtcggcatcaccgaattcgtgacgagcacggcctcgctgatactcaacatctgcgcattgctttgatggcattcggcgacacgccagaatttcttaaggccacccctgatgcttaaataaagaagttgcctgattttagggctcgcaaattggaattaaaaaagcgagcgtggcacagagattcacgtaagtgagcatctgcatggctacgcactgatgtggtatgaccacggggctgtatggctctgtgggtcttctgcgccggtgccctttgagaagcaggctggtaaacagtaactaacgaatcgctagaaagggcggaaggcaatggcgggacagaaaatccgcatcaggcttaagtcctatgaccatgaggtcatcgaccaatcggcgaagaagatcgtcgaaacggtgacgaacgcgggcgcaactgtggttggcccggttccgctcccgaccgagaagaacgtgttcgtcgttatccgttctcctcacaagtacaaggattctcgcgagcacttcgagatgcgcactcataagcgtctcatcgacattgtggacccgaccccgaaggccgtggactcccttatgcacattgatctgcccgcagatgtgaacatcgagatcaagctgtaagggaggagggaaccattatgtctaatcgcactgcactgctgggtaagaagctcggtatgtctcaggtctgggacgagaacggtttcttcgttcccgtgaccctcgttgacgtgtccaccaacgtggtgaccgccgtcaagtccgaggaatccgatggctacaaggccgttcagcttggctacggccaggttgatccgaccaaggtgaccaagccgctcgccggccacttcgccaaggccggtgtcaccccgcgtcgtcacctcgccgaggtccgcaccgataacgccgaagagttcgagccgggtcaggagctgaccgccgagctgttcccggagggtactctggtcgacgtgaccggtaccaccaagggcaagggcttcgccggcaccatcaagcgttggggcttcaagtcctatcgtcgtacccacggctctcacaagaacgagcgtcgtcctggttcggtcggcgcatgcgccactccgagccgtatcctcaagggcaagcgtatggccggtcgcatgggtcatgtgaccaacaccgcgcagaacctcaccatcgtctcgtcggatgttgagaacggcgttctcgccatcaagggcgccattccgggcccgaagggtggcatcgttctcgtccgttcggcagtgaagggagcctgataaatcatggcaaacgttactctgaacgttaccgataagcagggcaaggccgccggcaccgttgaggcaccggccgaaatcttcggcttctccgccgaagaggtccagtcccgcattccgctgatccaccaggtcgtcgtggctcagctcgccgccgcccgtcagggcacccacgccaccaagactcgtggcatggtttccggcggtggccgcaagccgtggaagcagaagggcaccggtcgtgctcgtcagggctccatccgtgcaccgcagtggtaccacggcggcaccgtgttcggtccgcagccgcgcgactactcccagcgcacccctaagaagatgaaggccgctgctctcaagtacgtgctttccgatcgtgccaatgcaggtcacgtggcagtcgtggacttcggtgtcgccgaagccccgtccaccaaggccgccattgccgctcttaccccggtgaccgagaacaagttcaccaccgtggtgctctctcgcgagaatgtgaacgaatggctctccgttcgtaacatcccgaccgttcacccgatcttcgccgatcagctcaatacgtacgatgtggtcaccgctcagtacgttgtcttcagcaaggaaggcttcgacgccttcattgcctcgaagaccgagccggctgtaaaggaggcctgattttcatggtcgctattcacaagcccgcacacgacatcatcctcaagcctgtcgtttccgagaagagctatgctctgtccgatcgcggtcagtacaccttcgtggtggctccgaacgcgaacaaggtgcagatcaagcaggcaatcgaagagatcttcaatgtcaaggtgacgaacgtcaacaccctcaaccgcgccggcaagcgtcagcgcacccgcaacggtttcggccagcgcgtcaatcagaagcgcgccatcgtgaccgtcgccgagggccagaccatcgacatctttggtaactgaaggctagccgagaaaagttaaaggaagaactagattatggctatccgcgtttataagccgacgtctgcaggccgccgtaacgcgtccgtctcggatttctccgagctcacgcgttccacgcctgagaagtcgctggttcgcaagctcagcaagaccggcggtcgtaactcttacggccgtatgacctcccgtcatcgtggcggcggtcacaagcgccagtaccgtctcatcgacttcaagcgttgggacaaggacggcgtgccggcaaaggtcgctcacatcgagtacgacccgaaccgttccgcccgcatcgcactgctgcactatgcagatggtgagaagcgctacatcattgctccggaaggcatcaagcagggcgacgtcatcgagaccggcgcccaggccgacatcaagccgggcaacaacctgccgctgcgcaacatcccgaccggtaccgtggtgcacgccattgagctccgcccgctgggcggcgccaagatcgcccgctccgcaggtgccgcggtgcagctcgtcgccaaggatggcgcttacgcccagctgcgtatgccgtccggcgaaatccgcaacgtggacgctcgctgccgcgccaccgttggtgaggtcggcaactccgaccacgccaacatccagctcggtaaggccggtcgtgcacgttggatgggcaagcgcccgatcacccgtggtgagtccatgaaccctgtcgatcacccgcacggcggtcgtacccgcggtggtaagccgccggtctctccgtggggcaagggcgaggttcgtacccgccgtccgaagaaggcttcgaacaagatgattgttcgtcgtcgcccgaatggtaagaaccgtaagtaagggagtgtcgagtagatgactcgtagcatcaagaagggccccttcgtcgacgcccacctgcagaagaaagtcgacgagcagaacgagaagggcacgcacaacgtcatcaagacgtggtcccgccgttcgatgatcacccctgatttcatcggacataccttcgccgttcacgatggtcgcaagcatgttccggtgttcgtcaccgaatccatggttggccacaagctcggtgagttcgccccgaccaagaccttcaagggtcatgtgaaggacgacaagaaggcacgccgctaaaggagagtaaggacacatggaagctaaagcaatcgctcgtcacgtccgcgtgacgccgcgcaaggctcgccgtatggtcgacctcatccgaggcaagaaggcgaccgaagccatcaccattctgaagttcgctccgcaggacgcatctcttccggtgcgtaaggtcctggagagcgccatcgcgaacgctcgcgtgaaggccgataaggccggcgagccgttccgcgagaacgacctggtcgtgaaggagacctatgtggacgaaggcgtgacgctcaagcgtttccgcgctcgtgcacagggccgtgccgctcgtatcaacaagcgcaccagccacatcacggtcgtcgtcgctagcaaggaaggaaaccgctaaagatgggtcagaagatcaatccatttggctatcgcctgggcatcactgagaaccatcgttccaagtggttctccgattccaacaaggccggcgaacgctaccgcgacttcgttctcgaagatgacgccatccgcaaggccatgagcaaggatctcgagcgtgcgggcgtgtcccgtatcgtcatcgagcgtacccgtgaccgcgtgcgtgtggacatccacaccgctcgtccgggcattgtcatcggccgccgtggcgccgaggctgagcgcgttcgcgccaagctcgagaagctcaccggcaagcaggtccagctcaacatcttcgaagtgaagaacgccgcactggacgcccagctcgtcgctcagggcatcgccgagcagctgaccaaccgcgtgaccttccgtcgcgcgatgcgtaaggctcagcaggatgccatgcgcgcaggcgccaagggtatccgcatcaagctctccggtcgtcttggtggcgccgaaatgagccgttccgagttctatcgcgagggtcgcgttccgctgcagaccctgcgcgccctgattgattacggcttcttcgaggccaagaccacctacggccgcatcggcgtgaaggtgtggatctacaagggcgatatgaccgagcgtgagttcgaagagcagcaggcacagcagggcaacaaccgcccgggccgtcgcggcgatcgccgtccgcgtcgtggccagcgcaatgccgccccgcagcagaacgccgcagccgaggctccggccgccgctgaggctcctgccgcaacggaaacgaaggagtgagctgagaaatgcttatcccaaagagaaccaagtatcgtaagcagcaccgtccggtccgccgtggcatgtccaagggcggcaacgaaatcgctttcggcgatttcggtatccaggctctggctccggcttatgtgaccaaccgccagatcgaggccgctcgtatcgccatgacccgctacatcaagcgtggtggccgcgtgtggatcacgatcttcccggatcgtccgctgaccaagaagccgttgggcacccgaatgggttccggtaagggtactccggaattctggatcgccaacgtccgcccgggtcgcgttatgttcgaaatcggcggcgtgtccgaggaagtcgctcgcgaggctctgcgccgcgcaatcgacaagctccccatgaagtgccgtgttattgctcgtgaaggcggtgacatctgatggcagtcggaactgcagactacaccatgaagaatctgaacgagaagaccaacgaggagattgagggcttcctcaagaagtccaaggaagagctgttcaacctgcgcttccagtccgccactggtcagctcgaaaacaccgcccgcctcaaggcggtcaagcacgacatcgccaggatgtacaccatcctgcgcgaacgtgagctcggcatcagccaggcccccgaggcgaccgaaacgaaagctgaggagaagtaatggctgaagagcgtaacttccgcaaggttcgtcgcggttacgtcgtgtccgataagatggacaagacgatttccgtcgagctcgagcagcgttcgacccacccgctgtatggcaaggtcgttcgttctactcgtacggtcaaggtccatgatgaacacaacgacgcgcatattggcgacctcgtgagtattatggagactcggcccctgagcaagaccaagcgttggcgtctcgagagcattatcgagcgcgctaagtaaataagttcggcaaggctccgtgagtcaccccgcctgcttcaagcaggcaggcggggtgcttggggagaaccagctcggctaaggagaatcaatgattcagcaggaaacgcggcttcatgtcgccgacaacacgggtgcgaaggaaatcctcgccatccgagtgctcggcggatcgaagcgacgctatgccggcatcggcgacgtgatcgtcgcctccgtcaaggacgccattcctggcgggtcggtcaagaagggcgacgtcgtcaaggctgtcgtcgtccgtactgtcaaggagcaccgtcgtgtggacggctcctacatcaagttcgacgagaacgccgccgtcattctcggctccggccgtgaaccgaagggcactcgtatcttcggaccggtcggtcgtgaactgcgcgacaagcgcttcatgaagatcgtgtccctcgccccggaggtgatctgacatggtagccaagatcaagagcggcgacctggtcaaggtcatccgcggcaaggaccgcggcaaggaaggcaccgtcaagcaggtgctcaaggacgaccgtctgatcgtcgaaggcgtgcagatcgtcaagaagcacgtgcgcgccacgcagcagggccagcaggccggcatcgtggctgtcgaggctccgattcatcgctccaatgtgatggtcatcgatccggagaccaagcagccgacccgcgtgggcgtcatcgtgaaggaagaggctcgtgacggcaaggtgaagaccgtgcgcgtgcgtgtcgccaagaagtccggaaaggagctggcatgaccgataccactgtcgaagcgccggcaactccgcgcttgaagcagaagtacatcgagcagatcgtgccggagctggagaaggaattcaactactccaacccgatgcaggttgctcgtgtccagaaggtcgtcgtctccatgggcgtcggtgccgcggctcgcgactccaagctcatcgaaggcgccgtcaaggatctcaccctgattaccggccagaagccgaagatcaccaaggccaagaagtccgtcgcacagttccacctgcgcgaaggccaggccatcggcgcctatgtcaccctgcgtggcgagcgcatgtgggagttcctggatcgcctgctgaccctcgctctgccgcgtatccgcgatttccgtggcatcaacggcaaccagttcgatggtcagggcaactacaactttggcctcaccgagcagtccatgttccatgagatcgatccggattcgatcgaccaccagcgtggcatggacatcaccgtggtgaccagcaccaaggacgacaaggaagcaagcgcgctgctcaagcacctcggcttccccttcaaggagaactgatatggcaaaaaccgctcttaagaacaaggcggccgctaagccgaagttcaaggtgcgcgcgtacacgcgctgccaggtctgcggtcgtccccactccgtctaccgcaagttcggcctgtgccgcatctgccttcgtgagaaggcccaccgcggcgagctgcccggcgttacgaagtccagttggtaaatatcgacgctgaaggtccgcggcccgatcgccattaaggcgtgagggcggcggaaaccatggcgagaaagggcgttagcccaaatgacaatgacagatccgatcgcagacatgcttacgcgtctgcgtaatgcgagcgcggcaaagcacgagaccgtggatatgccgtactccaagttcaaggcgaacatcgccgagatcctgaagcgtgaaggctacatcaaggacttcaccgccaaggaagccaaggtcggccagactctcgaggtcaccctcaagtatggcccgaacggcgagcgttccattcagggcatcaagcgtatctccaagccgggcctgcgtcgttacgcaaagtccgatgctctgccgatgccgctcggtggccttggcatcgcaatcatctcgactagctcgggactgctgacccagaaggaatgcctcgaccgaggcatcggcggcgaaatcgtcgctttcgtttggtgagaaaggagagctgaaacatggcatcgcatattggtaagctccccgtcgccattcctgctggcgtggaagtcaagattgacggtcagtccttcagcgccaagggcgccaagggctccgattcctacgagattccggaaggcatcaccgcgaacgtcgaaggtaacgagattgttctcgtcccggtcgacgatctgcgtccgacccgtgcaaagcacggtctggcccgctccatcatcgcgagcatggtcaagggcgtgcacgaaggctatgccaagactctggaaatcgtcggtaccggttaccgtgcccagatgaagggcaagggcatcgagttctccctcggttattcccacaccatcactgtcgagccgccggtcggcatcgagttcgaactgccgaacccgaaccaggtgatcgtcaagggcatcgacaagcaggctgtcggccagtgcgccgcaaacatccgcaagcttcgcgctccggaaccgtacaagggcaagggcatcaagtactcggatgaacacatcctgcgcaaggctggaaaggctggtaagtgatatgagcgtccagattttcggtaagggcaagaaggtcgcactccagcgtcgtcacgctcgtctgcgcaagcgcatcagcggtaccccggagcgtccgcgcctggtggtctcccgttccaaccgtcacatggttgcccagatcatcgatgacaccaagggtgtcactctggtgagcgaatccactctgatgagcgacttcgctggtttccagggcaccaagaccgaagccgccaagaaggtcggcgaactgattgccaagaaggctcaggacgctggcatcaccgcagtggtgttcgaccgtggtggcaacaagtatcatggccgcgtcgcagctgtcgctgaaggcgcccgcgagggaggtctggcactgtgagcgacaacgaaaaggaaacccaagtggctgaagaaactcagaacactcaggctgctgccgagaccaacaacgaggaccgcaagtcccgtcgtggtcagcgcggtgagggtcgtcgtggcgagcgtcgcaatcgtcgtgaggaatctcacgagaacgagatgctcgatcgcgtggtgaccatcaaccgtgtgtccaagacccataagggtggccgtacgttcagcttcgccgccctcgtggtggtcggcgacggcaacggcaccgtgggcgtcggttatggcaagtcccgcgaggtcccggctgcaatcgccaagggccagctggatgccaagaagcacatgttcaccgttccgcgcgtcaagggcaccgtcacccatccggtgatcggccacgatgccgccggtaccgtgctgctgcgcccggctgctccgggtaccggcgttatcgccggtggcgctgtccgtgcagtcatggaatgcgctggcatcaccgacgtcctcaccaagtcgatgggttccgccaccgccgttaacgtggtgcgtgctaccgtcgatgctctcaagaagcttgaagagccggaagagatcgcagcccgtcgtggcatgtccctcgaagaggtggctccggacgctctgctgcgtgctcgcgccgaaggcatcgccgaggctcgcaaggctcgcgaagaggcacaggccaaggccgctgccgctcagaaggacggtgagtgatgactaacctgaacatcaagctgcaccacggtctggtgaactccactccgaagcagcgtgctgcggctcagactctgggcctgaacaagattggcaagaccgtgacccgcgaggatactccggcccttcgtggccagctgctcgtgttgcgtcacctgatcaccgttgaggaggctgactgattatggcagatattctacagatgcatgacctgaagccggctccgggcgccaagagggatcgcattcgcgtcggccgtggtgaaggctccaagggtaagacctcgggccgtggcgacaagggcaccaagaagcgttaccaggttcgccctggcttcgaaggtggccagctgccgctgtacatgcgccttccgaagctgcgtggcttcaagagcccgttcaagaaggaatatcaggtcgtcaacgttgcggctctcgcggaactgttcccgcagggcggcgaaatcaccgttgccgatctggtcgccaagggtgctgtccgtaagggccagccggtcaaggtcctgggcgatggcgagatttcggttgcgttcaccatcaagggtgtcaaggcttccgcttccgccaaggccaagatcgaggccgcaggcggctccatttccgaggactgattccacggagtgaagctgacttaggtttacatgagtgaggcttctcccacatgattgtgggagaagcctcactcatttcgtgggccggttccgggccacgaaaaaaataaaaaacagacaaagggtggaaaaatccacatatcggtagacgccgtacgctagactcgtgcggtagagtctgttttgcatgggtgcgcgggcgcgcacgtcgttggaaggaatcccagttgaggacgttaatccaggccttcaagaccaaggagttgaggaataagatcctcttcacccttggcatcatcatcatctatcgtgttggttcattcgtcccgacccctggtgtcgactatacggtcgtgcagcagtgcgtcggcaagatgagcagcacgtccgaaaacttcatcggcctggtgaacctcttctccggcggtgcaatgttgcagctgtccattttcgcgctgggcgtcatgccgtacatcaccgcatccatcgtcatccagttgctgcgtgtggtgattccccgcttcgaggccctgcacaaggaaggtcagtccggtgaggccaagctgacccagtacacccgttacctgaccatcggtctggcggtgctgcagtccaccaccattctggtgaccgcacgctccggcgcgttgttcaactaccagtgctcccaggtcgtgcccgacggttccgtgtggaaccttctggtcatggtgctcatcatgaccggcggtaccggtctgatcatgtggatggccgagttgatcaccgacaagggtcttggacagggcatgtccatccttatcttcatgtccatctgctccggcttcctgccgcagctatgggagatcggctggggtaccaagggcaccgacggcaactggggcaagttcgccaccgtcgtaggtgtgctgctcgtcatcatgattcttgtcgtgtacgtggaactttcccagcgccgtatcccggtgcagtacacccgccgcatgatcggacgtaagatgtacggtggctcctccacctacctgccgctgaaaatcaatatgtccggcgtcattccgccgattttcgcatcctccatcctggccatcccgaccctgatcgcgcagttcggcaattcggaccagtcctgggtcaagtggatcaactccaatctggccaacaccacctccgtgtggtacatcgccttgtacgcgctgatgatcgtgttcttctgcttcttctatacggagatcacgttcaaccccgatgagaccgcggacaacatgaagcagtacggtggcttcatcccgggcatccgcgccggcagtgccaccagccgctacctcaactacgtgatgaaccgactgaataccgtcggcgccgtctacctgctgttcgtggcactcatcccgacggttctcatcatggcgctgaatctcaataccaagctgccgtttggcggcaccaccatcctaatcatcgcgggtgtcggcctcgataccctgcgtcaggccaaggcccagaccgagcagttccagtatgcgggcttcctgttcgagggcactgaccaccaagagggcaagtaaagaaagggaatatcaacgattatgcgactgctgatcatgggcccccagggcgtcggcaagggcactcaggccgcactgctgagcgaacactatggcattccggcaatttccacgggtgacatctttcgctacaacatcaagaacaagaccgagcttggtgtggaagctctgacgtatatcaacaagggcgagctggttccggacgaactgaccaacaagatcgtcaaggatcgcctggccatggatgacgccaagaacggctggattcttgacggctacccgcgcaatgcctctcaggtcgaagcccttgacgccattctcgccgatttgggcaccccgcttgacgccgtggtcgcccttgacgccgaccatgacgtgctcatggaacgcatgaagaagcgtgccgaaatcgaaggccgttccgacgacactccggaagccatcgccaagcgtctcgacgtctacgccaaggagaccgctccgctgctgtccacctacggcgagcgtggtctactcaagaccttcaacggcgtcggttccgtcgaagacatccaggccaccatcgtggccgaactgggctgatacgggcagtacggcagtaccacattcacaaggaaacggggattacgacacgccgtgtgtgtcgtaatccccgtttccgtgtattcttgcaagttggtgtgtcttcgggcacgcgtagtaatcgccaaggaacggaacgaggctcatggctaaagacggtgtgattgaagtcgaaggacaggtggtggaagcactgccgaacgcgatgtttcgtgttgaactcgaaaacaagcatatcgtgctcgcaaccatctccggcaagatgaggaagaactacatccgtattctgccgcaggatcgcgttgtgctggaaatgagtccgtacgatctgaaccgcggtcgtattacgtaccgttacaagtaaggtacaaaagcaaaggaaaaccatgaaggtcagccctagtgtgaagaggatctgcgagaactgccgcgtgatccgtcgtcacggccgcgtcatggtgatctgcatcaacccgcgccacaagcagcgccagggctgagagtagatccagcggcacaataagtacaggcgctgagtcacagttcgcgtcagcgagctgagccccgggtacgcaggcccgggccgggaaaccggacgacttggtgcaagacctgcggaacacagaaggaatcgcaatggcacgtcttgccggagtcgacatccccaatgagaagcgcatcgagatcgccctcacctatatctttggtgtgggtcgcactcgtgccaaggaaacgcttgccgcgaccggtatcaacccggacattcgcgtcaaggatctgacggatgagcagctgatcacgctgcgtgactacctcgagggtaactacaagatcgagggcgatctgcgtcgtgaaatcgatgcggatatccgtcgtaagatccagatcaactgctatcaaggccagcgtcaccgcaagggacttcctgtgcgcggtcagcgcaccaagaccaacgcccgtacccgcaagggcccgaagcgtacggtcgccggaaagaagaaggccaccaagtaattcggtggcggtgagtctaagccacgagacataccgtctcatcgcatagacatcaaagcaaattcgttattaggaaacgagggtcaatggcagctcaaaagcaagccgcgcgcaagccgcgtcgccgcgaccgcaagtcggtcccggttgggcaggcgcacatcaagtccactttcaacaacaccattatttcgatcaccgacccgtccggcgcagtcgtgtcctgggcgtccggtggcgatgtcggtttcaagggctcccgtaagtccacgccgtacgccgctggtatggccgccgaatccgcagcccgcaaggctatggaacacggcgtcaagaaggttgacgtgttcgtgaagggcccgggttccggtcgtgaaaccgctatccgttccctgcagtccgccggactcgaagtcggctccatcaccgacgtcaccccgcaggcacacaacggcgttcgtcctccgaagcgccgccgcgtctgagcactagaagaaatcatcgatccaaagccgcttatggccggtgagtgcaccaccggtccgaagctgaaaggataaccacagtgcttatcgcacagcgtccgacacttaccgaggaatctctcaaccctcagcgttcccgcttcaccatcgagcctctcgagcctggtttcggctacacgcttggcaactcgctgcgccgtaccctcctgagctccattcctggagcggctgtgacttcggtgcgtatctccggcgtcccgcatgagttcaccactctgccgggtgttgaagaggacgttaccgagatcctgctgaacatcaagggcatcgtgctcaccagcgaatacgatgagccggttgtcatgtatctgcgcaagagcggcaagggcgaagccaccgcgggtgatatcaccccgccggccggcgtcaccatcgccaacccggatatgcatatcgcgtccctcgccgatgatggcgaactcgagatcgagttcaccgtcgagcgtggccgcggttacgttcccgctcagatgaacaagcaggacaacgccgagatcggccgtatcccggttgattcgatttactccccggtgctcaaggtgagctatcgcgtggaagccacccgcgttgaacagcgcactgacttcgacaagctcatcctggacgtggagaccaagccggcaatctccccgcgtgatgcagtcgcatccgctggttccaccttggtggagctcttcggcctgtgccgtgagctcaacacccaggctgaaggcgtcgaggtcggccctgccccggtggcagaggagaccaacccggagatggccgttccgatcgaggacctcaacctcactcagcgtagctacaactgcctgaagcgcgagggcatccacacgatcggtgagctggtcgcccacaccgagcaggatctgctcgacatccgcaatttcggcatgaaatccatcgacgaagtcaaggaaaagttgcaggctcttggcctggctctcaaagcttcgccgctcggtttcgatgccaacaacctcgaaggcggcaccttcttctcgccggaagacgagtgatttaccgcttttgacctaaccgcttcgtcgaattcggatgttcgggcgattgcccacctgaattcgacggggcttttcaaggagaaacaatgcctacaccaaagaagggtccgcgtctggcctccagcccggctcatgagcgcctgatgctcgcgaacatggccaccagcctgttccagcatggtcgcatcaccaccaccctgccgaaggccaagcgccttcgtccgctggccgagcgcctgatcaccctggccaagcgtggtgacctgcacaaccgtcgtcgcgtgatgcgcgtcatccgcaacaagtccgttgtgcacaagctgttcaccgaaatcgccgagcagatggagcagcgcgaaggcggctacacccgcatcgtgaagatcgccccgcgtcgtggcgatgccgctccggcagccatcatcgagctcgtcaccgagccggtgagcccgaagcaggctgtggtgaaggaagctgaagccgcgaccaaggttgccgctgaagaggctccggttgctgaggcaccggtcgccgaggcaccggtcgccgaggctccggaagccgccgttgaggaagctccggccgagaacgccgagtgattgctttccagctgatcgtaagggccgggaatcgaaaggttcccggccctttgctatgcccgccctttgataagctcaatgcgtgagattacgaatcgacttggcatacgatggtggcggcttcttcggttgggcgaagcagcctgatcggcgtaccgtgcagggggagatcgagcgcatactgcacaccgtgttgcgcgtgcccgtcgatgatgcgggggaacctctccgtctgaccgttgcgggacgtaccgataccggtgtgcacgcctcgcatcaggtatgccatctggacatctctgaaaccatactcgcccgttgcgttgggcacatgaatgtgccgccagtggttgcgttgacgcgccggttgcagcgtatgctgccgaacgacatcacgattcatgggatcaacgaggctccccaaggctttgatgcccgtttttccgcgctggaacgcacctacgtataccgcattgccgatcggagcagcgaaattgatccgaggatgcgcggtttcgtcctgcacgtcgacgacgatctggatctggaaaccatgaaccaggccgcggccatgaccatcggcctgcatgacttcggttcgttcgccacgccaaaccccggcggcaccaccatacgtgaggtcaaaaccgcctactggaggcgcataccgcaacgtccgctcattgacggcgagatgacgatgggggagcgttaccgtacgccgtcaatggaatccggtctcgcctgcttcaccatcgtggccgacgcattcgcccgcaacatggtgcgatcgctggtcaacggctgcgtacaggtcggcatcggcaaacgatccctcgattggtttgcggacaagatggccacaccgctgcgcgaaggctcgacgggaccgatcgcaccgcaggggctgacattggagcatatcgaatatcccgatgacgatcagttggcgattcgtgccgaaacgattcgcgcgaaacgtaccttatgacgaaggagccgttccggccgatggatgagggggtcgttgtgacgattgtgttacggggatttaacctgtccgttgctgagatgtggatgtaacaattcctcgtggttttcggtaaccgacagccgttaccgtcgcttctactacggcatggtcctgaagattggcatgcgttattaggggtatgaaggagcgtggaaagatgatcgaatcggctgcacgtaaattggcgacggaactggtcaatcgcagggaatccatcaatcgcgagctgagccgtaacggcgtacgcttcggcatctataaaaacggtgaataccacgaccggctgttcccgtacgatccggtgccgcgcatcatcgaatccgacgaattcgacgaaatggaagcggggctcaagcagcgcgtcaacgcgctcaacgcctacctgcgtgacatctattccgacaaacatgccatcaaggacggcgtcgtgccggaggaatacgtctacacctcagcgggctattttccgcaggtcaatggcgtgacccctcccggcggtgtgttcgcgcatatcgccggcgaggatctggtgcaggggcaggacggcaaatggtgggtgctcgaagacaatctgcgcatcccatccggagccagctatccgctgtttgcgcgtgacatcgaacgcagaatcaccccaaggctcttccgcgacgtgcatgtacgtgacaaccgtgactatccgcgactgttgcgcaaatccatggacttcgtttccacggaaggcatcgccgtcgtgctcactccgggccgctacaattccgcgttcttcgagcatgcgtatctggccgagaaaacgggcgccgcacttgcattcccggaagatctcgaggtcgtcgacaacaagttgttcttcctcgactattccggcaagcgccaccgtgtaggcgtggtctatcgccgtctgtccgacgaatatcttgacccgttcgcctttaaccccgattccgtgatcggtgtgccgggaatcctgtcggcataccgtgccggcaacgtcgccatcgtgaacgcccccggcaatggtgcggccgacgacaaggccatctactatttcgtaccggccatgattcgttactatttgggtgaagagccgattctgcagaacgcgccgacctatatgccgatgttcgagcaggatcgcaaggaagtgcttgaccggctgggagagctcgtcatcaaggacgttgctgaggccggaggctacggcgtgatcttcggatcgtcgctcgacaaggcgcaacgtgaggagatggccgatcgcatcaaggccgaaccgcgccgtttcatcgcgcaggaggtcatccagttcaaggacatcgatgtggtcgatcccgaaaccggtgagatgagcccgcgcaagtgcgacctgcgcgccttcgtggtgaccggcaagaacacgcacgtgtggtattcgggcctgacccgatattcgtcggtgcccggacagatgatcgtgaactcctcgcaaggcggcggcttcaaggatacgtgggtacttgccaaggataccggcgtggagcacgattccgcaccgggctccgaaagcatcaacctgctggcacaatcccgcaagcattcgctggcgctcgtgaccgcttccaaggccgacaatctgtactggctgggacggtacacggaacgcgtgttcaccaccttgaaccagttcttccccttctacgaccgcgtgatggacaccgatgtggacgctttccgcccgttcgcccgcgcactcgacctgccggaggacttccaggatttcgacgccttcatccacagcttcctatacgacgagaagaatccggattccgtgcgcagtgccatcgtctacgccttcaacaacgccgtaatcctgcgtccggaactcagctcccgtctgttgcagtatgtggaactcgccatgagttccatcgtggaagcggccgatcgcgccgccttcgacgaagatatctacaagcatcgtgacatcgccgacaacatgctcgccttctggggcggcgtggagaactcgccggtcgatccgacgctgaaatccttcatcttcgtgggcaagtacctggagcgtgtggacctgtatacgcggttcggctactccatggaggagctcaaggcgccattgggcaagcttgcatcctatatcatgccgttgaacggcctgccggtgccgcagtgcttcgccgacggcctgcgctggttggtcgggcagcttccgtcccgcgggtatgccgatcttgccgacacgctcggcacgttgctcgacgatttcgatgaacgcatatgcacgaatgatctcaaggatttgggaatgctgaacgccatgaatatggacgccaaacgcgtgtagtgaacaagggtttgccatgggccgctcaagtcgtgtataacggcttgagcggtttcgctgtggtagggtggtacaaggattttttcgctggggagacgatgtgaagaaactggtgtttgactatgagatgaagctctcattcagctcgcccgtaaccgatcatcggttccaattgcgatgcattccgactacgggaccgcgtcaacaggttgtggacgtggaggtccggatcgagcccgaagtggagctcgacaccactgtcgattccttcgattccgtggtgatgaccggttttattcccgaaccgcataccatgttcaactattcggtgacgggcatcgccttcgtggacaacgagcatatcaagccggagattcacaagccgttgtatcgtttcaactccgcactgaccattccagggcccgccgtcaacgcgcttatcgacgtgtgcaaggcgcgcatcgccgcattgccggccggcggctcgccgatcgatcaggcccgcgaagtgatggatgaggtgttcaagtccttcgtgtatacgcctgcatccactacgatccgcaccaccgcggaggaggcgctcgcccaacacaagggcgtatgccaggattacgcccatgtcatgctgtcggtctgccgtcatgtcggattgacggcgcgctatatcgcaggcctgctgggcggcgagggtgccacgcatgcttgggtggaaatctatcatggaaaccgctggatcggtttcgacccgacgcacaaccgcatggtcgacgacaactacatcaccatcgcgcatggtcgtgactaccgcgactgcatgctcgacatcggcatcttctccggttgcaatgtggaacaaagccagtgggtgaacgcttccgtgcacgagcaggaactgtagcgtctttcgccgggacatggccgcaaaggcaaacaaaaaaaggttgaaacaccattgtttcaaccttatctgttggcggatgaagcgagattcgaactcgcggaggggttcgccctcacacgctttcgaggcgtgctccttagaccgctcggacattcatccatatgctgcttgcacgcaagcaacttgtccattgtgccacagcatcgaggattgtcaaattccattggcgggtcttgcgtgtgggcgcgttcgtcggcgtgccgtcagtcgaatagggcctcatcgaaggcgggatacccccaatacagcgccagctccgcgcggtcggcaatgagagcggccagcgtaccaagcgatgccttgcgggatgcgttggatgacgttccttcgcccgtagcgttggagcttgcggcaacggcgctgatttcgctgcgcgcacagttcatttcgatgacggcgccggtcggggctttgagtcctgtcgccccgtcgaccatggtgtcgggattggcgagcagcgtcgcggcatcgtacattttgtcgcgatggtcgtcatcgttgccggcgagggagatcaggcgttgcgaagtcgtcttatgacggtcgctgaggtcgagggagacgttgccatcggaacgtgcggcgagaatttcggtcgcgaatcccgcggcatcctcggcctcggccatcgtcgacagcgaatcgtcgtcgaggtccagcgaggaaacgtcatcgagacgtgacggcgtcaccggatcgacggctatgccgaggcgggtcgccagcgtccggacgatatgacgggcttgcgcgccgcgcatcgtgccttcgccgaatcgtgcggaacactgcgtggcggtttcgatccaatcgtatgaggcctgccgcgccgacagataccgttcgacgatgtgcgttgacgtatcgttcatgcggtcgctgttgctcgaagccgacagataggcgctttcgcaggcgctgagcctacgctctgactcggcccttccggcgacgcgcggcgttgagcatgcggatgcccccatagcgagggcgaggatcgtggctatggcacaggcacgtctggtaagcggtgaagccgaacgatgaaacgggtgacgtgtctgcatgaaacattacactaatagttgactgtgaccattgggccaagcgctcggaataacttcatataggaggtcttgaagatggaactggacctggcaggaatgcaccagctcgcagctggtcagggaattgatcccgagacgctggacgccgctctttcggaagcattgcgactggcatatctgaaaaccccgcatgcggcgaagcatgctcgtatcgagcttgatccgcgtgccggaagctttaccgtatgggcccaggatgagattccgggcgaaccgaccgaggaagatccgcatcccgcgcccacattgggcgaggagtacgatgacaccccgcacgatttcggccgtctggccgccgcgaccgcgcgtcaggtaatcagccagctgttccgcaaggccgaggatgacaaggtgttcggcgcgttctccggtcagaaaggcaagctgatcaccggtatcgtgcagcaggatgccaaggataccgccaacgtgcatgttgccgtcggcgatgtcgaagccttgcttccgcgccgtgagcaggtgccgggcgaacgctatcgccatggcgagcgtatccgtgtgtatgtggtgaatgtggcccgcggcctgaagggaccggaaatcgtggtttcccgttcccatccggagctggtgcgccgcctgttcgaacgcgaggtgccggagctggtctccggtgccgtgtcgatcatggccatcgcccgcgaggccggtgcccgtacgaagatcgccgtgcgcgccaataccgaaggcgtcaatccgaagggtgccctgatcggccccggcggtgcccgtgtgcgtgccgtgatggagaatctcggtccggaaaagatcgatatcgtcgattggtcggccgatccggcgaaattcgtcgccgccgcgctgtcgccggccgtggcgaccggcgtgcaggtgatcagcgagaagaacaataccgcgatcgccttcattcatgatgaccagttgtcgttggccatcggcaaggaaggccagaacgctcgtctggccgccaagctgaccggctggaagatcggcatcgaatccgctgaggcgcatgccaagaagatgcaggaatcggccggggaaagcgctgaataatcatcatttgagcatgctttgagcctgtgggtgtacaatccacaggctcgagtatgctggactcgatagtccaaagcatgggggtggaacgcccttatgccgggaaaagacgaggtatcacgaacatggttgcacgatgagacggagcaagctcgccgtgaatcagtagcggtcgcgctggtatgcgcggcccgggataggagaaattgagtgccgaaagcacgcgtatatgaacttgccaaggaatttggcgtagacagcaaaaccgttttaagcaaacttgaggcgatgggcgaattcgtgaagtccgcttcgtcgaccgtggagccgccagtcgcccgcaagctgaggagcgcgttctcgaacaatgcgtcgggcaatgcgtccgaatccaagaaacccgcagcaccggtcaagaagccggcgtcgccgacccatacggcgccatccgaggccaggccggccgcgccgaagcccgttccggcggccaggcagactccgagggcggaagccccgaagccaggcagcccctccgcgccgaagccgggccagcgttccgcgcatgccggtcgtccgggcgatcagcgtcagcatggcaatcgccagcagggcggcaatgcgccgcgtccgcaatcttccgcaggcatgcgtggcggcaagtccgctccggtgccgggtccgcacgcaccgcgcagcaacaatcagcagcagggcggtggcaacaacgccaagccgcatactccgggaccgcgtccgggcaacaatccgttcagccgcaagcagggcatgcatacgccgacgccgggtgacattccgcgtccgcacccgatggcgcgtccgaatgccaatggcaacgaaggtcgtcgtggcggtcgccccggtcagggcggcggccagcgcggtggcttccgcggtcgtccgggacagggcaccggtgccaagccggggcagtggggccagcatcgtccgggtcagggcggcggccagcgtccggcaggtggcggcaaccgcttcggtggtagtggcaataccggcggctatcagggcaacagcgctccgagcagcagcccggcacgcggcggcggccgcggtcgcggaggcgccgcaggcgcattcgggcgtcagggcggcaaatcctcgaaggcacgtaagaaccgtctggcgaagcgtcaggaattccaggagatgaaggccccggtcatcggcggcgttcgcattccgaccggtaacggacagaccgtccgtctgcgtcagggctcgtccctggccgatctggccgagaagatcaacgtcaatccggcggcccttgtcaccgtgctgttccatctcggcgaaatggccacggcaacgcagtccttggatgagtccaccttccagatcctcggcgaggaaatcggctgggacatcaagatcgtgtccgccgaagaggaggataaggagctgctgcagcagttcgacatcgatttggatgaagaggaactgcaggaggatgaggatctgcggcctcgcccgccggtcgtcaccgtcatgggccacgtcgatcatggtaagacccgactgctcgacaccatccgcagcaccaacgtcatcgcacgcgaagctggcggcatcacgcagcgtatcggtgcataccaggtcaccgtggatcttgagggtgaaccccgcaagatcacgttcctcgataccccgggccacgaagccttcaccgcaatgcgtgcccgcggcgccgaactgaccgatgtcgcgattctcgtggtcgcggccgatgatggcgtgatgccgcagaccgtggaggccatcaaccacgctcaggccgcacatgtgccgatcgtggtcgccgtgaacaagatcgataagcagggcgccaaccccgacaaggtgcgcggccagctcaccgaatacggtctggtgccggaggagtatggcggcaacaccatgttcgttgacatctccgccaagcagggcaccaatgtcgacaagctgctcgaagccgtgctgctcaccgcggatgccgaactcgacctgcgcgccaacccggatatggatgctcgtggcgccaccgtggaagcccgactcgacaagggtcgcggtgccgtggccaccgtgctggtacagtccggtacgctgcatatcggcgacgccatcgtggcgggaacctcctatggccgcgtgcgcgccatgcttgacgagaacggcaccgccatgaaggaagccactccgtccactccggtgcaggtgcttggtctgacctccgtgccgaccgcaggagacctgttcctggtcgccagcgacgaccgcaccgcacgtcagatcgccgagaagcgtcaggctaccgagcgtgccgctcagctggccaagcgccgtaaggtcgtttcgctcgagagcctcaaggagcagttcgccaagtccgaggtcgacatgctcaacatcgtcatcaagggcgattcctccggttccgtcgaggcgctggaagattccttgatgaagatcgaggtctccgacgaggtcggcatccaggtgatccatcgcggcgtcggtgccatcacccagaacgacgtcaacctggctacggtcgacaaggccgtcatcatcggcttcaacgtgcgtccgaaccgtcaggtggcggatctggccgagcgcgaaggcgtggaaatcaagtactactcgatcatctacaaggcgatcgaagacatcgaagcgtccctcaagggcatgctcaagccggaattcgaagaggtcgtcacctcccactccgaaatccgcgagatcttccgttcctccaagttcggcaacatcgccggcgtcatggtgcaggacggcgaggtcaagcgcggtacgaagtgccgtattctgcgcaatggcatcgccaccgtcaacgaccttgagatctcctcgctgcgtcgtttcaaggatgacgtcacctccgtcaaggaaggctatgaggcaggtatcaacctcggctccttcaacgacatcgagatcggcgacatcatcgagaccttcgaaatgcaggaagtcgagcgcaagtagtcgagtcctttcgacagcttgcctgacaggatgaagggaacgcccacagtcggatttcggctgcgggcgttccgcaatagaaatacgaacttataaggaaacccatggcaggaaccaatccccgcgccgcacgcattgcggcgctgattcagcgcgtgatcgcgtcttcgatggaggcgcagctgcatgacaagcgactgtccaacgtgaccatcaccgaagtgcgcgtgaccaacgatctgcagatcgccaagatctactggacccagctcggccatgaaggccgtgagcagggcgaacgccgccgtgcacagcaggccctgaaccaagccaagggacgtctgcgttcgctcgtaggctccaaggccggtctgcgcctgaccccgcaacttgagttcatcttcgatgaggtgccgggagaggcccatgagatcgaagacatcctcgccatcgcgcgcaagcgtgacgaagagcttgccaaggcccgtgagactgcgcagtatgcaggcgacgccgacccgtacaagcatgatgagccgaacgatgacgacgatttcgatgaagatggcgacatcgaagtcgaagattgggacgatgacgacgaagaagtctgagatttccggcctgctcgtcgtggataaaccgcagggtgtgaccagtcacgacgtggtcgcggcgatacgtggcgccctgcatatgaagcgtgtcgggcatgccggcactcttgacccgatggccaccggcgtgctggtgatcggcttcggcaacgccacccgactgctcaactacatcgtggaccatagcaagacctatctggctacgattcgactcggacaacgcaccgccacggatgacgccgatggcgaactgctggaaccgtcggcaccgattgcagaagcctttccatcccgcgagaccgtggaacgggtcattgcggaacggttcaccgggcgtatcgaacaggtcccgaactcctattcggccattaagatcaacggccagcgtgcctacgatctggcccgtgaaggcaagcaggtcgaactgaaggcccggccggtaaccgttgaggaattccgcgttgacgccgtgcggtacggctatgcgtcaacgagacatgcggatgcgccgttgaccgatgcgcaggacatcggtgcgggggagcggtggcatcccatctcggccgctccggatgtgcggccggtcatggaactggacgttgcggtgagttgctccgcaggtacctatatccgtgcgttggggcgcgatttgggtgaggcgcttggccttggcggatacctgaccatgctgcgccgcattcgcatcggcgactttaccgaaaccatgccgaacatcgtcactgcgcacaccgaatccaaaaccttcaccaatcgggaaggcgcggaagtcacacgtaatcgtgccgtaatcgacgatgccgagcatctaaccgaccgtgcactcggcatggtcgacagcgccaaagcgtccatgcccatgctgcgaatcagcgatcaggaggcgactgacctgcgcttcggccgcagaatcgcccatgacatccgtgagactacggccgcatacgtgcccgaaaccggcgatttggtggccatcatcgagcgcgccaaacgaggcgaagccaagccggtggccgtattcgtacaacaacaagaaggacaacgatgaagataatcacgctgacgccagacgaaagcggcatggtcgactggcccaccttaagcaacgacaagaagtccgtactgaccatcggctccttcgacggcatgcatcagggccatcaggcggtgatccgccgtgtggtggaactggcccggaaggaacgttccttctccgtggtggtgttgttcgagccgcgtcccgccatggtgcatggctatgcggccaagcatgacggtcaggaaccgccggtcggcatgctcgacacccaagcgctgaccagtgtcgatgagcggttgcgcagcatcaacgcactcggcgtggattacacgatcatcgtgcgctatacgctggaattcgcggcgaaatcctaccggttcttccttggccagatggtcggcaagctcggcatgcgcgcgctcgtactcggtgccgacgcggctttgggagccaatcgtgccggcgacgtgaaggccatcgagaatctggcattggcaaccggcgtattccagctcgacgtggtcgacgatcatggcccgggagagacacgggtgccggccaatgccaagccggtcatgccggccgaccatggcgagccagccgacccgttggaaggcgccaccaaggcggaacggcgtgcatggagcaagaagcatcaggccaaggccgtgcgcgtgtggagctccaccaacgtgcggtacctgctcggtcagggccgtatcaaggatgcagacgccattttggggcatatgcatgctgtggaaggtaccgtggtgcatggcgaggaacgcggacgcaccatcggcttcccgactgcgaacctgagtcaggatgtgttcggctatctgccggttgacggcgtctatgccggatggctggtcgatttgggcaaggcgggagacgagcccgggaaacctgcggacggcatcgccaccgcatacgattccagctccatggatgcgcgtctggcaccgcattcgccatatcgttggccagccgcaatctccatcggcaccaagccgacgttcaacgaagccaccggtatgcatgagcgcgtggtcgaagcctacgccatcaccgatgactggcttgatctgtatggtcatcaggtgcgtgtggaattcgccggattcctgcgtccgcagatcaggtttgcatcggcggacgatctggccgctgagctcaggcgcaacgttgaggagacgaagcgcctcacggcgtgacgaacgttaaccatgtccacggtcgaacaggggcggacaccctacggatgggtgtccgcccttacgttctttcgactggacggtaacgccgtcagctcttgccgtcagttcctgaaatgagagaagaactctcgggtttcgggatcctgggattcatccatgacctgttgcggcgtgccgttttcggcgatgacgccgtggcgtagcagtacgatgcggtcggcagcatcgtgtgcgaaactcatctcgtgcgtggccatgagaatcgtggtgccctgttccttgagttcggccaccatgtcaagcacctcgccgaccagcatcggatcgagtgccgaggtgatttcatcgagcagcaacagttcgggattcgtcatcagcgcacgggcgatggccacacgttgctgttggccgccggacagctgatcgggataagctcccgctttggcgcgcatgccgatgcggtcgagcaactccagcgcgcgtgcctcggccttggccttgctccaatgatggaccttggtcgcagccaatgtgacgttgttcatcaccgacatgtgcgggaataggttgaactgttggaagaccacgccgatgcgtgaacggatctcatcctggcgcacgcgcggatcggtgatgtcggtgtccgccaaccagatctggccgtcatcgacacgctccagcagattcacgcatttcatcagcgtcgacttgcccgaaccggaaggaccgagcacggccacgacctcatgctgattgacatcgaaggaaatgcccctgagcacttcgttgccattgaaggatttgcggatgccgtcaagacgcagcaccggggtgttggcattgctcatactgtgcctccgctcaattcgcgcttgcgcagacgtgccgcataccagtcgttcagcaggatgaacggcacgctcatcagaatgaacagcaggctcgccaccacatacggcgtgaaattgtaggtgctggccacttcgatctgtgcggcgcgtactgcgtcgacggcacccagtacggaaatcaatccgacatccttctgcatggagatgaaatcgttcatcaatgcgggagccaccttgcgcaacgcctggggaatcacgatcatgcgcgtcgtctgcccggcagtcaggcccagggaacgggccgaagcgcgttgcgacgggtgtacgtcgttgaaaccggcgcgcagcacttcggccacgtatgcggaatagcccatgaccacggcgatggtgcccagcagtgacggatcgatgcgtccgaagatgcccaggccgggaatgccgaatccgatgaggtacagtacgacgatcatcggtacgccgcgcatgatcgtcgtatacagtgcggcaagtacccgcagcgggaacaacaccggattgttgctggtgcgcaccagggcgatcagcgtggcgaagatggctacgccgatcagggccacgaccagcaccttgacgttcagccacaggccagccagtacttcaggcaatgatgctgcgaagtattcaggggagaagaacgtctccttgacccgcggccagccgggggacatctccagtccgaccacgatgatggcagccagcacgatggtgctgatcagactggtgatgaccgatttcagctgttgccgtttgcggtatgcgcgtcgggaaagctcaacctcgctggtctggtggccagcgaggtcgtccggacggttatccgaaatactcatgaacgggatcctcgtgacgggggattacttgagttccgtcagatcggtggtgtattcggcaagccactcgtcctgcagcttctgcagggtaccgtccgactgcagttcgtccacggccttggaagcggcggaggtgagcttggaatccttcggcagcacgatgcccatgccgttcggatcggtggagccggcgatgcggccgacgaccttggcgtccttgacttgctcggactgcaccatgtacacgcattccacggtgctggtcaccagggcgtcgatctggttggcgtcgagtgcctgggctacggccgcgtcatcgttgaaggtctgcacgtcactcttgatcttcttggcatacttgtaaccttcagtgcccaccatcgcgccgatggtggcgtccttcagatcgtccaggctcttggcattggcgtatttgccgttcttcttgacgatgatggcctgcgagtcgttgtagtagctgctggtgaagtccacggccttcttacgctcatcggtgacgccgaactgctggatgttcatgtcccagtccttggcgcccggtgcgatggcggtgtcgaaagtggtgcgggtccataccacgtcggacttcttgaagcccatcttctcggccacggcgtaggccacggcagcctcatagccttcgccggattccggcttgtcattcatgacccacggctcataggccgggtcgccggtggcgatggtcagcttgcccggattcaccgtctgctgggtgatgtcggagctgtcggaacttgcggaggccgagccggaaccgttgcccgaaccgcatgccgcggacagtgccaatgctgcgacggaaacgatcgccgccgcggcacgcatgagatgcttacccgaaaatgccatgttcttctctttcttcttgtggatcgtggtgcattgcttctctatggatgatgcttgtgatgccgggatacgtcatggtgatgcgcccacactataacgtatcgtgattttcgaaatgcgtcgatcggtattacggtattcgataacggattattcgagggtgaagccttcgaacacgaaacccggactcaccacgcaggagaccagtgcgtcgccggagccgggcacggtgcgttgccagactccggccggcaccaccgcgtgtccgcataccgcggcatcatgccgatcggaggcgaggtcggaacccagcacgatggtttcgagccggtcgtctgcggcaggcccgtcgccatcgccgcccagctgaagcgtcaccggggcgggaccgtgccacaaccagatctcgtcggcatcgaccttatgccaggcgctggcgtcgccctgcggcaacaggaaatagatcaacgacgccaacgggcgtgcgctgccgccatcgatgtgcggcgattgccagtcccgtatgtaccagcctccttccggatgcgcttcgagaccaagtcgtgacaccaccgatcgcgcgtattcgctcatatcctccaacgcgacgctcatagccgctcctttccgccattcctgatgatgttgcccgtgttcgttcgtgaccggtgtgcgcctgtggcctaccgttcttgccgtatatcgaatatgccgtcgttatgcacgacgttgcccgagatgatggttgcgcggttcgtgccggctccgtgccggacgaaatcctccagcgtccgttcgatggcgtatggagaatcgatgcctacgggaatgtcgaagaacgccagatcggccgtggctcccgcattgatctggccgatgcgtcccgctcccacatgcatgcccatctcttcggcaccgccgatggtaatcatgcggatgatgcggtgggtcagatcgtcacgcgtatagccctgttcgcgtgccagatcgtagatcatggccgcatcgtcgagcacgtccagacttggcgagcttgacagcgaatccgtgccgacggccagcaggttgccttcttccagatattcgcggatcggagcgtcccggccggtcacggtgatgcggttcgaacgtgggcacagtgccacgccgacgccacgctgccgtaggatgcgccgatcttccgcatcggcccacacgccatgcgcgatatgcacgtcgggaccaagcgaacccagctggtcgacgaattggatggcggaggcgcctttgccggcggccctgagctgcttgtagctggcccattggccgtcgcgccagtcggctgccgaatacgtggtgagcgtggtgtcgcgctcgcctgcctccatcggcgtttcggccaggtggatgtgcaggcgcatgtccagttgccgggcgatgtcgggcagatccacgaacggtccggattccaaggtgtatggtgcatgcgggctgataccgatgctgggcaggccttcctgatgcatgtgcccgaggttgtcgatgagttccggaatgccctcggacttccagccgccgttatgccaccccatgacctcccagtaggcgatgccatgcatgccttgcgaggcgagggcacccacggcctcggggtcggtcacgatgtcggccgccgccgtggtgccggattggaccatcatgcgtgcgccccgataggcggattccttccatgggcgagtttcctgcagtttggcatacaccgtgttgaaaccgatctcccaagcgcggaagcggtcataggtgccacggcccacttccgccatgtcggtgtactgcaggtgggtatgcgcgttgatcaggccgggggtgatgatgccgttccagtggtgttcgacgacacgtccgttggtggccatgtcgtgtttcagctcgttgaacacccatcggcgggtgcccacatgcaccacgcggcttccggccacggccacggcaccatccaacaccactggtccggtgacgggaatgaccatcggtgaactgtagacggtcaccgagtcgagcggttgcggatgcgccgccagatgcagcggactgtcgagggacatgccgttactccttctcattctccgcgaagcgggtgagtgtccaatcatacccgttgtcggccacggcatggcttgcccgatagcctcgcgtacgtaacgcgatatcggcgatgtgacggtcgatgtcgcgtccgaggcgttgcagtccgggctgcaacgtgccgcgatgcctgagcagatgggccacggccgatgcctgcaccgcgaagctcagatccatgatttcgatcggattgccgcctccgacggtgtagttgacgccgtcaccttccgaaatcagacgaatcaccgggccatcgggcaccgccagatcgcggagctctcgcttgttctcggcatggaatccgtcaatctgatccaatgcgatttcattggcgatgccgccgatcaccgacagcacggcgtccggcttcatccgccgcatatgctgcagggtgatggtatggcgcacgccggtcgcggagacgacgatgtccgactcgccgatcgcctgatcgatgtcataggcgcggaatccgtcgaatacggcctgcagggcgaccacgggatcggtgtcgcagatggtgacgttggctccgagcgcacgcacacgatgggcgaagccccgtccgaccggaccatagccgaccacgctcacattgctgccggcgaagcaatcggatccgagtatgcgctgcaacgtggtgatgcaggtttcgccggtgccatgagcgttgtcgaaaccggttttcagcatgctgtcgttgacggcgatgacgggaaaggtgagcgccccggcatcctgcatggcctggaatgcgcggatgccgctggtcgtctcttccgccacgccgatgatatgccccatgagttccggccgttccattgcggcaagacgggcgaagctcgcaccgtcatcgatgatgatgttcggctgaatctcatccaataagtcaagcgcaccctgatgcgcctgagccggcgtccaatcaggatcgtatgcgactggaatgccttccgtgcgtagctgtgccgccacacgctcgtcgttggcttcggaaccgcagtaggcgcccacgatggcgccggcggccttcagctgtcgtagcagcacggcggtcttcggctcaagaatcagacagaccgcgatacggatgccggtgaaatcgacgtccttgcgcatctgacgcatcaatgcgtcaagtacgagcatgtgttcctgtgcgaatcgcatcgcttcggcaccggtcagttcacgcgcgtcgaccacgtcgccgagcggcatggtcgcgtcgatggcgtgacccgtctgcatttcggcggaatcacgggagggaaccatgccccaatcctgcgcctgtgcgaggtcggcttggtcgatgccgcatgacgctccgccatcatgcccgatgtaaagccgtgtgccggccaatgaacggttggtcttctgcgaatatgcttcagcccatgcgctgaaacggaacggttccatggggtctcgttactccttaatccttctgatggccggtatgcaaggcatgtctatttcagcaggacgccgagcgcgtccttaagcgtatcggcttggacgatggtgagtccggggacggtgacgcgcttgcgcaacgtcggcactacggcggtggtgaagcccagtcgtgcggcctcgcgcaaccggtattccagacggggaaccggacgaacctggccggtcagcgagatttcgccgatggcacaggtcgtgcgtgcaatcgccttggatttcgcggcgctcgccaacgccgccacaatggccagatcacagcccggctccttggcgagaccgcctgcgatggtggagatgtacaggtcgttcgccaacagattgatgccgccatgccggtacagtacggcgaccaacatggcgatacggttggaatccacgccgttcgccgcgcgtcggggtgtcggcagcacggatttcgtgaccaatgactgcacttcgatcggcagacttctgtgaccgtccagcgtaaacgtcacacaggtgccttccaccggaacggaaccattcgaggacagaaacagtccggaggggtcgctcacctcttcgatgccctcgccgctcatgtcgaagcagccgacctcgtcggtagggccgaagcggttcttcacggcgcgcagcatgcgcagcgccgtctgggcgtcaccttcgaactggcacaccacgtcgaccagatgttccaaggtacgcggtccggcgatcgaaccgtccttcgtgacatggccgaccagcagtaccggaacgtcaagcgtcttcgcggcgtcgatcaatgcgctcgccacttcgcgcacttgggtggagccgccggagatgccgtcgacgtcctgcgaaacgatggtctgtgcggaatccacgatcgccagcgccggcctgacctgttcgatcaggcccaataccgtagccagatcggtggtggcggccagcaacatgtttggttcgatcgcattgatgcgggaggcgcgcatgcgcacctgtgcctgcgattcctcgccggaaacatacaggacgacgttgcggtcacgatgattggcgacctcgcgcgccacattgcccgccgtttccagcaacagcgtcgatttgccgatgccgggctcgcctgcgatcagcgtcaccgatccgggaacgatgccggagcccagcacacggtcgaattccgaaaagccggtggggattctggacatgttttccgtgccgatttcggtgatcggcctggcggcggaggagggtaccgcgcccgattgcgtgcgcgacgtgcgcccaggggcggcggtgcgggaagcggcggaaggccgtgcctcatgaaactcctcgatggtgccccactggccgcattccgggcaacggccgtaccacttcggtccactccagccgcattctgagcacaaaaactgcacggaagtcttcgccataacgttgacattacggaggttttaggacattgcgcgtcttatggctgtgaaagaattaagcgtatgtctaatacgcaaacctcttcctcccatggcaagctgatcgccgccgtcgtggcggccgccgtggtcgtggtgctcgctctggtctccgcgttcgtctggccgggctgggcgttgaacaagaacgatgcggcgacgtcttcgcagtcgtcttcgcagaatgccgaatcaaatgccaagccgaccatcgacgcagtggcacttccggacggctcgagcgaactgctcaaggccatgccggacacggtattgaatttcgcccgcaccaaggccgacgccagcaatacttggagcggtgcctccccggtcgaggaatacacgttgacctattcgaccggtgacgcctccaaggacatcacgctcgtcgtggcgcagtggacgcagcaggatgccgcgaaaacgcagtatgacgcccttgccagcgccatgaccggcaaggagttgggtagcggcaacgtgaaggtcagcggcgagcagaccggcagctattccttcaagtccgacccggatgatgagaacaaggcagtggcgctatggcagaacgacaccgtggtgttccaggcgacgggttccaaggagtcggtgcagcgtttctatcagcagttcccgctgtagattccggcatgattccagtatgcgagtgtgcctgtgcgcattcgtccccgaagcagtgtagtattgggcaagttgcaaacttttaccctttgaccaaggaacggaggctgagatgggctcggtcatcaagaagcgccgcaagcgtatgagcaagaagaagcatcgtaaactgcttcgcaagactcgccaccagcgcaagtagtcttcaggcgcgtacgaagcgttcgcaaaacaaaatcccgcgactcctttcggagcgcgggatttttgctatgcaaagactcacttgttggagttggtcatgacgcgcgggccgttcggatcgccgacgatgacctgatcgaccatgtgcaggaacaggccgtgctccaccacaccgacggtggtgatgaggtcttcggccagatcctccggatggtcgatgcgctcgagatgcagatcgaccacatagttgttctcgtcggtgcgcaccggctggccttcggcgtcaaggcgcagcaccggcttgtaaccacgggattcgaacttcttgatgacctggcctgcgccgaacggaatcacctcgaccggcagcgggaacttgccgatggtgtcgacgaccttggactcgtcgacgatccatacgatcttgttggagttggtggccacgatcttctcccacagcagggcggcgccgccgcccttgatgccgttgaagtccttgtcgacctcgtcggcgccgtcgatggtcacgtcgatatggtcgacgtcatcgatgtcaacgatcttgatgccgtagccttcggcctgctcctgggtgcggcgggaggtggtgacgcccgtgaactcgagaccctcctccttgacgcgacgaccgagctcgtcgaccaggaaacgtacggtcgagccggtgcccaggcctgcgatcatgccgctctgaatcaacttggcagcctcgatgccggccgccttcttcagtgcatcctgctgtgccttgtccataatgctccttcgatatgggattaagaccggttccatactatcggatgcgctgatttttggcggcttgaaccatgtcatgggcgccacgttcggcgtgcggacggcaacgaaaaagttttcacatagtgtttcacggtgtattaggcgtgcttcaccgcgaacggggcctcatccagtaccagcgtgccatcacccatcacatagccttccacggcgatatagccacgaatcaggcgtggcttgccgtcaaacgtcggactggactccggcgggggagcgaaccgtaccgtacccgacaccgcaagtcctgacgggctgggccgatgtggcagtttcggcagattccgatccgccgggccgctggaggtatccgcatcgtccgccttcggtgactgcgacacagttggcgtgccatcgtccgccgtgccaccgtccgtcatgccgtcggcggtatgctgcaaaaccgttgtcgccgcgatgtcatcatccttcgcagcgggggtctcatcgtcgtccttggggaaacaatccggcctgaccagcaactcggcaagcgatttgcggggtgcatcggtggcctccgtggtctcgagcggccgtgtcggttcctcgatcgccagtgtttcggtgggttcctcaaccggttcgggggccggatagccttccggttcgaccagcatgtcggcaatcgatttcgcggatttgcgaggaaggggcgtcgtgccgctttcgccccggccgaggtgatactccttcgtgccgattgcgccgtcaagcagcatcctggcatcctccggaacatcggtgccttgcgaatactcggaggccagcaatgactgccaaccctccaatggcagatatccttcacgaaccttcgaacggcaatcatccgcgtaggtgcgtgccagctcatcgaccttctcgttgccggcgttgccggcatgacctttgacccacacgaacttcaccgggccgggacgttgggaaatctccgcgtcgatcgccttgatcagcgccgcgttcttcaccggcttcttctgcgaattcttccaaccgttcttcttccagccgtgcacccacttggtggaacagttgatggcatactgcgaatccgtttcgatcaccaacggttcggaacccggatgcgcgcgcaacgcctccagtacggcgcacagttcaccgatctggttggtgccgttcgtggcgccgccggcatcgcagtcaccggcatggtcatggccgggagtgccgcccgcattcaggtcgtgatcggcccagccccaacccatcgggccgttcgggttgccaagtgcggaaccgtcagtagaaaccgtaatcgtcatgcctctaccctacggaggccgcgcgactcgtatcggttcagaccttgtcgaggcacaacatgaccgacgccttgaacatctcgccatcgtattcgaatgccgccgtgccgccgtaccgttcggccgtctccctcaccgtcatggtgcccaggccgttgccgccatgcttgctcgaggcgaagtcgccatcgacctgcgtgacggaggaatcgtatgaattgtcgacgacgatgaacagcgaggccggaggtccgtcgttgtaacgaatgcgtacgcgcagcttcttatcgccgtcgctctggatcatgatcgcctcgacggcattctccagaaggttgccgaccagcgagcacagttccgcgttgttgatgctgatgtatgacggcaccgcggccttgacgtcgacgtcggcgcctttgtgacgggcccaatcgcagtagtagaccagcaccgcattcaacgaggcgtgctcgcagtactgcatgggatgttcgggagcaagcagccggtgtttggccatctgctcaaggtagtcgcggatgccgtccacgtcgttggccgcggcgagcgtctgcagggtctgaatatggtgtcttgtattgtgccggatctgtctcgcttcgcggatgcgttcgttcatatgctgcagctgtagggtctgcatcgccgcataatgctcccgcttggtcgcctcgagcaaccgttcggactgcctgatcatataccagatcagcagataggccaatgccatgaagcaggagtaggcgatggcgatggtgaaggcaagtgcccgtacgtgctctttcatgaccgaatcgttgtcggcgggcaggcaccagaccacgattgccgttgaaatgaacgggaacagccagatgagctgccagaaggacgaactgatggcgggactgttgagcgtggatgggatggagtcgcgcaatggatgccataggcacagcggcgcgaggatgtcgagtatgagctgattgatgaatcccggccagccgacgcgcaggttcaccgactgctcgccaagcacggccacgtccatgaccagcgacagataatagatgatcgccaccacgtaggcggcggtgctgcataggagcatcaccttggagacggtcaggttcgtcaccttgctgaacaccagtaccgcgacgatgccggtcggaaacaccgtccatagcgttggaatccggaacatgccgcatatgaaaccggacagtatgaaccatatcgtgccagccgccagaatgatgccgccggtgagtttcggattctccatgcggttccacatggccatcaggcacagtatgaggcccatcagtgcgttgatctgttcgccgatggcgaagaacatatcggaaggtgccgtggcggcgaccagttcgatcagattcatcactgctccgatctcatgcgggtgaacgtttattccgcgtatttgcggcaggtggtggtcaccgcggttttggtgatgggaatgcgcttgccgcccttcatcacgaattcggcgttgctgatgccggtcacgtagtcgaagttcaccaataccccgcgtgcggtgcggtagaagttgtcgaagacggtgagacgccgctccacgtcggagaagttcgtgcggatcttgctgcaggtgccatcggcgaacgtgaactccacataatgcgcgttggacaggcagtagacgatgagacggcgatccatgttgattgcgggattgccgaatgccacctgccaggccgcatcggcggcatgcgacggtttgtccgtcgacagatgcgtgacgcgtggtctttcgctcagggtttcgtaggcgcgatccatggtcgcgtcgaaattggcgcggctgatcggtttcaatatatagcctgtcgcctgcacctcatagccgagcacggcgaagtcactgctggatgtgatgaagacgatggggcagtcatcgcgttgccgtcgcaggaaacgtgcgatgtccaggccggtcggtgccgtcgcgtcggtttcgtcgtcggtcaggtaacagtcgagcagcaccaggtcgaaacggttggatttccagctctcgatgaaatcgtcggtgccggtgaaggtgccgcagtcaatgtcaagatcgtgcttgtcccgaaaataggcggtgcacatggtctttaccagctgtcgttcggcaggatggtcctcgacgattgcgacgcgcatcatgtacctcccttggcaatgagaccgaatcccgggtttgtgttcaagcgtaaccgtctcgggtgatgttaggggaccgcttcgggtgtgtgtcatgccagaagacggtgtttcgtgccagaggttccacgcatgaacaagcccgtcggaggatttccggcgggcttgttcgcagtgtggatccctatgattgcttggatctatcggttaatcaatcggccagtgccttgtcgacgacctcggtggcctcggcgagcaccttgtcgagcgcctcgggggattcgaaggattcggcgtacaccttgtagatgttctcggtgccggacgggcgagcggcgaaccaattgttcttggtggtgaccttcaggccgccgatcttggcatggttgcccggagcttcggtgagcttggcggtgatgtcttcaccggccagctgggtggcttcgacgtcgtcgccggaaagcttgccgaacttgatcttctgctcaagggtggtcggcgtgtcgacgcgcttgtaccagctttcgccgaagcgctcgacctgctcctgatgcagctgtgccgggttcttgccggtcttggcggtgatctccgcggccagcaggtccggaatcaggccgtccttgtcggtggtccacacacggccgtccttgcgcaggaaggacatgccggagctttcctcgccgccgaaagcgacctcgcccttgaacagcggatccacgaaccacttgaagccgaccggaacctcaacgagcttggcgttgatggaagcggcgacgcggtcgatcagggaggaggagaccagggtcttgccgatgccggcgccctccggccaacccgggcggttgccgccgaacaggtactccacgcatacggcgatgtagtggttcgggttcatgacgccccaattcgggcacacgatgccatggcggtcggcgtccggatcggtgccgccgaccagatcgtacttgtcccatgcgccgttgttcagcgaatcgaccaagcccttcatggcatatggcgagctcggatccatgcggatcttgccgtcgtgatcgatggtcatgaagctccaggtcggatcgacctgcgggcgcaccacgtcgatggtcaggttgaacttctcattcatcagcggccaatagttgaccgaggcgccgccaagcgggtcgatgcccaggcgcacgccggaggaacgaatcacgtcgaagtcgatgacgttctccagatcggagacatagtggtcgcgatagtcgaaacgctcgaccagatcggacttgacggcctgatcgaacggcacgcgcttgacgttgcggaaatcgccgagcagctcgttggcacgatcggcgatggcattggtcacgtcggacggagccgggccgccggtgaccggatcatacttgaaaccgccgtcggtcggcggattgtgggacggggtcacgacgatgccgtcggccaggccctcgccggtgaagcgctgggtgccgtcggcggcgcggttgtgcgtcaggatggcctgggacacgaccggggtcggcgtgaagtcgtcgcgtgaatcgatgcgcacggtcacgccattggcgacgagcacttcgatggcggtcttccaggcaggctcggacagggcgtgggtgtcgcggccgatgtacagcggaccggtgacgccggccttcttgcggtattcggcgatggcctgcgtgatggcgacgatgtgggcctcgttgaacgaggtcttcagagacgaaccgcggtgaccggaggtgccgaaggagacacgctgttccggaacgctgggatcggggacgacgtcatagtacttgccgatgacctcgtcgacgttgatcagatcttctggggtggcgggcattcccgcattatttgcaaccatagccccattctgccacgctttggggcgatgcgcgcgtaagcgccatattgtgttcaacggattatggcgaaggattcacgttgcaggcttcgctgcgggatgatttgcatgcgatgggggaatggtgtatcgtgcttagcgattcgactaatgcagggttgctagtcaactgagagacgcaagacctgaggtatggcatgctttgctgtatctcgggtcttttttgttgctttcgagcagcgttgcatgagtcgggacggttgtatccgggaaggaaaggaaagcaatcaggatggctgactcactcgcatcgcagatcatcgccgccatcggtggtcctgaaaacatccgcagtctgacgcactgcgccacgcgactgcgtttcgaactggtcgacgcaggcaaggtcgaccagaacgcccttgaacacatgaagggcgtgctgggtgcggttccgcagagcggcgaccgcttccaagtggtgatcggcggcgccgtggccactgtatacgaagacatcatgcatctgcctgaaatggccaatgcaggcggtgccgtggcttccggcaatgccgcaggtgatggcggcaagccgatgagcaacgccgaggtgaaagcggcggcccgttccaaggcgcgcggcaaggtggcatggctcgattccttcttcgaatacctgtcagactccttccgcccgattctgggcgtgctgctcggcgcctccatcatcatcgcgctggtgaacctgctgatctccctcggcgtgatcccgaacgatgaagcatccgcaggctgggtgttcgtcaaggccatctggaagggcgtgttctacttcctgccaatcatggtcgcctacaacgcctccaaaaagctcaaggtcgacccgtggctgggcggctccatcatggcgatgctcatgaccccgcagttcataagcctgatgaacaccaagaccttcggctccaccgtgtgcgtggagaattcggctctcggcaccacctcctgcaccgccaacatcttcggcctgccgatgcagctgagtgactacagtggcaacgtatttgtgccgttgctcatggccgcggtgctcgccctcgtgtaccacggactgaagaggatcattccggacagcgtacagctcgtgttcgtgccgttcttctccatgatcatcgtgggtgcgctcaccgcattcatcatcggtccgatcggcgtatgggccggcaacgccctcggcatcggcctggcatggctcaacaactacgctccgttcgtcttcgccgtcctgattccgctgctgtatccgttcctggtgccgctcggcctgcactggccactcaacgccctgatgctcatgaacattcagaccctccgctacgacttcatccaaggcccgatgggcgtgtggaacttcgcctgcttcggcgccaccgccggcgtgctgttcctgtccatccgcgacaaggacaaggacatgcgcgcaacttcgctgggcgctctggcggccggcctgctcggcggcgtttccgaaccgtccctgtatggcatccatctgcgttacaagctggtctacaagcgtatgctgatcggctgcggtctcggcggcatcgtcatcgccgtgctcagctggttcttcccgtccgtcaccgcctccggccaagtcgtgcatggcgtgaccaccaccgcgttcgccttcacctccctgctgaccatcccggtcttcaaccagatgtgggtgtatgcggtttccatcgccgtggccttcctgacctccttcatcctgatcatcacccttgattaccgcaccccggagcagaaggccgaagtgctggcccgagccgccgcggaatccaaggtcgagtccgctccggccgcagccgcgccgaagggcaccccggcagccatcaaggtggccgaggcgaccgccgacgccgaagcgggttccgacgaagccgccgcggcgatcgcacaggcttccgccgacacggtcaacgcgccgatcgcgggccacgccatcacgctggacgataccggcgatccggtgttcgcctcccgtgcgctcggtgaaggcgtcggcatcgagccgaccgccagcaccgtggtggccccggtctccggcgtgctgcagaccgttgcggaaaccggtcacgcctttggcatcaagactgatgacggcatcgaggtgctcgtgcacgtcggcatcgataccgtgaagatgaacggcgaaggctttgccgtggccgtcaaggcgaaccagcatgtgcatgccggcgacctgctcgtcaccgttgattttgataaggttaaggaagctgggtacagcaccaccacgctgatgacggtgctcaacaccgttgcattcgcctccgttacgccgaagacgggcatcgacgtcgaagccggcgatgcggtgatcgacatccagcgctgaccttgcagtcactgtaggaaagggtcgatgtggacgttcttcgtgtattcaacaacaatgtcgtgctggccaaggatggcgaccgtgaggtgattctcaccggtcgtggcataggcttccaagccaaaccgggccaacatgtcgacgatgcgaagatcgtccgccgattcgttcctgcggacggccgggatcccgaccatatggccgaactgttggccgggatcccgccggagatcattcgactggtcaccgatgccatgtcccgtaccgggcttgccgagcagatcgaggcacagcccacactggtcatggcactggccgaccatatctgcggcgcgatccagcggtcgcagaaagggcagaccatcgaatacccgctcgaggcggaagtgcgttcgctgtatgcgggcgaatacgccaaaggtgaggcgctggtcaacgccatgaacgattatctgggtggggcgttgccaaaaggcgaggccgtggcgcttgccctgcatttggtcaatgccggcttctccaccggagatctgtcgaacacctacaccatgaccggcgtgatccagcagatgctgtcggtcatcgaaaacacctacgacgtgacgctcgaccagcacagcgtcaatgtagggcgcttcatcacacatctgcggtatctgttcgtccgtatctaccagcatcagcagctcagcgacgagccgcagccaatcgtcgataccatcatggcatcatatccgcaggcgaccgcctgtgcgaggcaactcgccatcgtggtaggcatgcggttgaacgcgacgctgacggaagcggaaatcgcctatctggcgcttcacatttcccgcgtcacagccgatgcggccaaggaatcgtcatccgaggagacgacttccggcacgcgtacgcatagtgcctgacgttccacgctgaaccggatatgcttcgtctcaggaagcatatcgccgtcgacctgcgccaaaacgggcttttccaatgtgatttcggcgcttacgccctgaatctggtccaccgtggaattcgtggacagcggactctgctgtgccttgccggtgatcgtctggtgcagtacgtcgccgaacaggttggcccagcccagaatgccgccggaggtgtcgatgatctcgtaatcgaggatgccatcgtcgtagacggcgtccggcatcagcgagaacatgggaatctggccgcaattgcccgccatgaacgtgcggaaggacaggccgcgcgtggtatgcgtgctgccgtcctcgctggtgatggtcacgtcgccatggtatttcggcgcgaacaggttcttgacgcccgacacgaaatacgccagccagctgatgttcttcttgagttcaggatcggtgtcgtcgatcatcagggcatcgaagccgatgcccgcgatgatcaggaacgcgtggccatgatcggtggtttcgtcatcgagcagggcgagacggccgacgtccacttggcgggagccatgcgaggtggccacggtcagggcggcgtcgatgtcatccacgggaatgcccatattgcgcgcgaacaggttgccggtaccgatcggcacgatgcccaatgcatggccggtacccgacaatgcactcgccaccgtacgcaccgtaccgtcgcctccgacggccactaccacgtcggcaccgcgatccaaggcctcgagtgcgcagacacggccgtccttgtcgagctgcgtgtcgatgaagtccacctgcgtaaggcctttcgcctcgcagaattccctgatatgccgcttgcgctggtcggcctgcggcttcgaagggttgatgacgaatacgtaatgcacttggtcgtcgctgcgctggtcaagctgacgcgccaacttgtgatgtctgtacgcgcgcacgccgaagaaggcggcgacgcacactgcggccacgccgatgacgatgagcaacgagatgataacgggcataggcatgtctcccattgtcaccgaaaataggtcgaaaatgtgaattcgacgcgacaaaatcgacgaaaactgcacgttgcacgcaaaaacggatggtacatgttcactgtcggcttgcggcactagtcttaaaggcatgcttgatatccaattcattcgtgaacatgctgacgttgtcaaggaatcccagcgtaagcgtggcgaatcggtcgaacttgtcgacgaggtgctacgctccgacgaggttcgccgctcctctctgaaggaattcgaagctgcccgcgcgcagcagaaggagatcggcaagaaggtcgccgcggccccggccgacgagaaggccaagctgatcgccgaaaccaaggaactgtcccagaaggtctccgagtacaaggccgccgccgatgccgcagccgaagagtatacgaccgccatgtggaagctgtccaacatcgtcgagccggaggctccggaaggcggcgaggacgactacgtggtcgtcaagaaggtcggccagatccgcgatttcgcggcggaaggcttcgaaccgaaggatcatctgaccctcggccgtggcgttgccggcatcgatatggagcgcggcgtgaaggtcggtggctcccgtttctacttcctgcgcggccaggtggcacgcatgcagatcgccatgctgaccatggccgtcgaccaggccgaggagcacggtttcaccttggccatcaccccgacgctggtgcgcccggaagtgatgcgcggcaccggcttcctcaactctcatgcggacgagatctaccgtctgcgcgagcccgacgagcagtatctggtcggtacctccgaggtggcgctcgccggcatgcatgagaatgagatcctcgatctgtccgacggcccgctgcgctactgcggttggagctcctgctatcgccgtgaagccggtgccgctggcaaggacacctccggcatcatccgcgtgcaccagttcgacaaggtcgaaatgttcgtctacaccaagcaggaagactcctacaaagagcatgaacacctgctggccatggagcaggagatgctcggcaaggtcgaggtgccgtaccgcatcatcgacaccgccgccggcgacctcggctcctccgcggcccgcaagttcgactgtgaggcctgggtgccgacccaaggccgctaccgcgagctcacctccacctccaactgcaccgagtaccaggcccgtcgcctgaatatccgtgagcgtatggaggacggcaacacccgtgccgtctccacgctgaacggaactcttgccaccacccgctggctggtcgccattctcgagaatcaccagcagaaggacggctccatcgtcattccgcaggccatgcgtgcctacatgggcggcaaggaagtcatcgaaccgaccaagtgggaggcctgatttcaggcattgctgaatttggcatgcgattgagataaaaacggcgtcagcgtggtgctggcgtcgttttttgattcacgattcggtgtttcgctacggatcttggctgggaatcctctttttccgtttttggatggacgaatcgagattgtcgtctcacgacgctgtttatgtgtgtgcgatgctgaagatttccgaatgctgtgctatattgacgtttcgtgcattgcacattggacagatgtctgagcggtctaaagagacggtcttgaaaaccgttgaagggcaaccttccgcgagttcgaatctcgctctgtccgcctttgggcttattggatttttcagtaagccctttttctttttgaaggtggttgattgcatgtgtgttggaaacactgtgctgttggcgtagtttcatggaaatctcataagcgttcgaaggactatgaaaataatcgtaataacgatttcataatgctgcaattctcttgaaatttcaagaaaagaaattcatgataacgtttttacagatatacttgtgatacggctttcaatggtgatggtcgtgttctgctcaggcggggtattcaaaggagaagaaaatgagttattggagtcgtgtggtggcttcggtttccgttggcgctacgctgttaatttccggaggtgccgttgtggttcagtccgcaatggctgctgagggcaataaggcggtgcaaattcttaatgtggattatgggaccgaaacgggtgattttcgtggcggtgcttcggggacgctctatgggcttggcgatgacggttctccaacaaatgccatacttgacggtgctcaggtggagaattcctcccagaagcctccaagtggcacacagcatccgagcggtgacgcgttgtctttggagaatcagttcttttccaacggtggtaatgaactggcagtgtacatgcaggattactactcggattggagctataacggcggtagccgtccgtccgatgaccgaacctatgtacttgacgtaccggtaagcgatcccacctacggaacctatgcttccggtggcgatggcgtatgggattatgctcaaataaccgaaatagtggttaacaaaattctggccaacaccgaatatcccgaccggtacacgttcattcctttcaatgagccggacggtggaaactggtacgcgtcaggagacaatgcgaaggcaaagatcttcaagacattcctcagcgactgggactcggagtacgagttgattcagaaaatatggaaccaatacaaatccggggaaaaggtcggcaaaaccgtccctacggcggaccacgcccgtgttgcggggcctggcgactgtgagtatcggcagaacaggagcaatgccttccttgcacatgcgaagtcgaaaggcacattacctgatgtgttcgtatggcatgaattaggcaagggaagtctgtcgtctttccgtacgcattatgaaaagtatcgtgcgctggaaaagaagaacggaatcagtccactcgatgtgaacatcaccgagtatggtgaactgcgggatatgagtgtaccgggtcagctgattcaatggcagtcgatgttcgaaagcgaaaaagtgcaggcggaaaccgcgtactggaattacgccggaaacctttccgacaacatggccaaggccaattctgccaatgcgggctggtggcagttcaaatggtatggagacttgcgtgggactcggaccgtcaaagtatcatccgattacctgaacaaagcggacagcctgcaggcaattgcagccatagatcaaaccaacagaaaggccacggtactttacggcggtgccaatgacaataactctgaccaagtaaagaacactggggcgaatattccggtcactgtccatttttccggtcttagtacagagagattcggcacttcagtagatgtggaagttagggagaatgcattcaccggacctgacggagttgcggccacgccaagagttgtgaatgtggtctccggagcggatatttctgatggaactctggacgtgaccacaatgagtgttgaccgatacgcatcatatcaactggtggtcactcctcatagtgatcgtgctctgaaagtcgatgatgcttctaccggacgggccctacttgttgaagaggctgagaatgccgttctgtccggtggtgcgcagacgtatgttaagactccatggggcgatggatggaactatttcatgacttcaggcaacggcgatgttggcagcttcaaatcaggttcgaccgctacttggacggtggatgttcctgcggatggaacatatcgtttccaggtgattagcggaaatacgggattccctggaacgaacggggtcgcagtggacggcatcagtgccgggacactgcggctcggtgctgagcttgccatgaaatcggccgcaaaatggttgtatcgaggtagtagcgagattgaattgcaacttagtgaaggcgttcatcaaattcaacttcaggggtcttccatggataacacgcttgataagttcctcctgtatcaggtgagtgattctaatgggaatatagataagaccgaatatcctgcttctcaattccgtctgacagacggtgcgtcccttacctatgaccagagcggtgccaaaggctttgcccaactgaactctggtgttgtcaaggtgttcgcgcatgcatgggagagcggataccataccgtcactttggaatatcgtgccgctcagggtgatgtgatgagtcttcggattaacgggaaccttgtgggcgagatcgttgccgaatcgaatggattgcagagttcaagcatcaacgtggcaatggccgagggcatcaatgaaatcactgtgtccggtgattcgtcgattctggtgtgcgatgtgatggtcatcagggatctgagtgatgatggcgccgcgatatccgttgaggcggaggatatgcagcttggcggtggtgcgcagatcgtgtccgcttcgggaaccaatgcttctggtgatggatacgtttccggacttggaaaccaatttgttacgcaggagagtggcgcctccggcatgggagaccagactcgagtcgtgacggtggactcgaataatactcctgaccttattgagggaaacaagggaactcttacgattcctgcagggaccgttcctgcaggaagatattcggcggtggtgagtttctccaacgacgcgttcatcggaaaccatgactacaatcctcagattgtggatttgggattgcagatccgcgcaggtaacgacgaaggcgaggagctttcgagggatgcattcagatacacgtattcagataccaattttcttgatagaactttgagtgttacgacggatggcggtgctcttgtgttcggcaattgggattccccgggattgggccagggtgcggtatcgtggggtgtcgcgccaaatatcgacaagatcgtgttctatcccattgtggctggggaggttgtcggacgctctcttggatgatgggcgatttaagaacgtcgtagttttgtgaaaacgataccaaggcattcccggttcggtctagaggtcggactgggaacgccttctgtgggaactgcgtaaatccaacgtttgcgaaagcgggaaatatgttgctctgatttgacgtgaaaacgttatcgaagtacacttaagtcatcgaataaaaaagctcgcatttattgcaaagttgtagtgcgggtgggaatgttgaatcaactgtcttgcttgataacgttatcgggtgaatatacagaatgaccttgcgaaggagcggtcccatggaaaggcaatatatgtggggaaacgatagcgtgtctcttgccttcgaagtgaatgcggacgagcatgtatcgctttcccgcatcgtctttgggatggtggagaaggtttttgcacaaaggctgccgcttgcggaaatcatcctctccggtacgggacattggatcgcatgtgatcggctgatacatacgaccatcggcagggatttggtccttttgtcgtttgatgagaggactaagggggagtcgcgatgtcttgacgtcaaaatgagggatgagcaacatgctctcgatgtggtcgtgacatatgtgatttctccgggaacgtccgtggtctgcacatatgcgacggttatcaacaggggggcggggcatgtgtttcttgagtcggtgaccagtgccgttcttcctatggggtcgatgtctaatgatgagacctggaagaaggaatggatcctgcttgaaggtcattatgattggcttggcgaggggcgttggtcctatacgaaatgctcggatctgttcccagtgcttcgtcaggagcttacgaatcataatccgcgcagtgagcatgctgtcgtttccacgggaacatggtctacgggcggatcggtgccgatggcattcttggagagccgggagacgggcaatgtgtgggctttccaggttgagcataatggcgcatggcgttgggaaatcggcgacaacacagtggatggatacttcgcgttgtccggccctacgagcgtcaatcattcatggatgaaggatttgggggaaggcgagtctttcgcgactgtgccggcgtcgttcgtcatgggtggggacatgcagaccaccgttgaggaaatgacgaaataccggcgaatcggaaggttggtcgatgagtcgtccgctgtttcccaagtgatattcaacgactatatgaatacgataaatggcgacccgaccacggaaaagctgttgccgctgatttcaagcgcggcgcaggttggttgcgaggtcttcgtcatagattgcggctggtatgacgattccggcgattggtggccgagcgtcggagagtggaagccgtcaaaaaccagattcccggggcctaggggaatcggggaagtgattgatgcgattaaagaggcgggaatggttcccggtctctggctggagcccgaagtcattggaatcaaatcacctgttgcgcaagagcttcctgactctgcgttcttccaacgcaacgggcagcgtgtggttgagcaggagcggtatatccttgatctgcgcgatgagtctgcccgccgatatttggatggcgttgtggatcgactgatcggtgactacggcgttcagtacttcaaaatggattacaacgtctctccaggggctggaaccgactaccacgctgattcggtgggggatggattgcttggccataatcgagccttccttgattgggttgatggtctgcatcgtagatatccgaaattgattcttgaaaattgttcttcaggtggaatgcgtgaggactttgcccagacgtccagattccaggtgcaatccacatctgatcagcaggactaccgcttgtacccggttattgcggcgacggctccgttgatggtactgccggagcaggctgccagttgggcgtatccgcaggccgagatggatgcggagcagacggcgttcaatatcaataccacgttcttggggcgtttcttcctttccggatacatcaatcaaatggaagagtggcagaagaacattatccagcaaggtattcaggcctatcgagagcatgtgcagccgatgattggggagtcggtgcccctctggccgcttgggttgccatcgtgggattctgcggtggtggcgttgggtgtgaaggcctctcagcggacgatagtcaccgtgtgggtgaggaacgctccggaaacggtgaaggaggttgcgctcttcttgccacacttacacggcgagggcgttcaatgccgaacgattttcccggttggtcccgcttttgatgaatgggatgccaaatggtcagaagctgattcgagtcttatcgtgtccattccgcatggaatgtatgcgtcaagatctttcgaactcgttgagaaaggcggtgaaacccttctttcgtagtgagttcgtatgagtgcgttgcacgaacacaatggattgtaataaaagagaaaagaaaggtgatatcaatgaagatgttcacaaaggcccacgttgcgacggcggtcgctatgggagcggccctgtcgatggttctttcgggatgttcgaaccctacggccggagatggcaatggtgatgtggatacctccgcgaaggattactggccgtctgccacacaaaagcttgacggtgtggaattgaccatgtgggttgcacagaattccaacaagattccggtcaaggtcgtcaatgatttcgagaaggcaactggggccaaagttaagctggaaacgattcctgacccatatgagcagaacatccagaccaagatcacaacgggtgacactcccgatcttgctttctggcaacccactcagtccatgcttgctggattcatcgcccaagacaaactacagaagctggataacgcaccttgggtggacgattatacggacggcatagccgatgccggcggcgtagtcgatggcactcgttatgcggcactggtatccactccgccagtgatgggtgttttctacaataagaaagtctttgagaaagccggcatcacggagattccaaaaggttgggatgagtacgtggcagtagccaaaaagatcaaggacgccaatatcgacggagtcgaatctccgctgttcgagatgggtggatctcagtggggaacccagtactccgttcagattcagcttgccgaggctgctcaggacggcttgtgggatcgtgttaattccggtaaggagaagtttacggacaagacgattcagactgccatcgacaactacaagcatctctttgatgaggggttgtataacaagaatgccggttcggcgaaggacaccgatgaggctcaggccctttgggaaggcaaggcaggcatgattgtctgcgtgaactccttgttcaaccagattgccgcgttggcggacaatgacaaggcggcacttgatgagaacataggtttcttcccgttgtctgccaagggcaacatcggaacggtcattccggaacagaataactcggtggtcgcattcaagacgagtgattccaagaaggaagccgccgcacgacagttcatcaattattggatgactgaggattatgaaacgttcgtcaaggatcagggcattgtctccgttattaaaaacgtggacacgcctgacaatgtgccgcaggcattgcttgactcggcagattccatcaaggattccgtcggttccatgcaatccttggccgtggcgaatccggatctctatatcaacttggccgatatgatcaatggcaccaagtccgcaaccgatgtagcgaaagcgactcaggatcaatttgctcaacttgcaaaggcgcaagggatcaaggggttctgaaagaaatccaagtaattacggtggggcaccgcaaatctggtgccccacacccatcagccacaatcgataggggaagaacaatgtcagcacaagcagtggcacgtgcggtgcccagaccagagaagaagaaaagaaacaagagtcaaaaggtgcttatgcggcagaactatccagttcgttatctcattccggcttatgtgatgctactcatcttcttctttgttccgactattctcaaccttatttacgccttcacgaattggtctgcttattccaagacgatatcgttcgtaggtctttccaatttcgtagatctcttcaggtcgggaaatctgctgcgtgacctccgtattacactaatctatgctttgctggtcgcgatcttccaaaacacattcggattaatgcttgcggttttccttgaggaggacactagaatcaatcgcttcgctaggactatgttcttcattcccgtcatcatgtccgctttggcggttggctatatttggcaggcggtactcaagtccgatggggctttgaaccagattctatccttcctgcttggtgcgaatatcgatgtggcgtggctgggatctacgatatggacgattatcgtcgtagccgcaatccatggatggaagtggatgggactgtcaatgctcatctttctggctgggctcaaaaccatcgattctgacgtaatagaggcggcggccattgatggagcgacccgtaggcagaccttctggcgtatcaaatttccgcttcttgcaccggctttcacttttaatgtggcgacgtctttacttggctccatgaacggtttcgacatcgttcaggcaacaacgcagggcggtcctggaagcactaccgaaatcatcaatatcttcatctggagaacattcggtcaaggactgtattcgcagtccacgacgatgagtcttgttctgttcattatggttatgatcatcgcagtgccgctcatttggtatctgcgcagaagggaagcgaaaatcctatgacatccgcaacgtatggcgcagcgcccaagaccaatgattccgtcacggtcaatagaccttccaaagggcatgccatcttccacgccatcatggttttcgtggtgatgatagtacttctcggcattcctttctggctgttggtggttacagcagggaaaactcaagcggaagctgtggtccctaatatgagtctgccaagtcagtggcatcttctggagaacttcaaaacggtattggtggacggtaaaatgattgccgcgttcttcggatccatcgttgttaccgttccgtcggtgttcctcgcactgctgttcggttcgatggcctcgtggattctcgcgagacggacgaccaagctgcttgccgttgtgtatgcgttgggcatctccggtctgattcttcctccggccgtggtcactgtgatgatgctgctgaagatcatcggcctgtccggcaccgcagtgggtatggtcggcgtatatgtgggcatctacatgtcgacggtaattttcttcgtcactggtttcatccgtaccattccggtgtcgctcgaggaagcggcgcgtgtggatggtgctaagccgatacgaatcttttttaccatcattctgccgttgctcggtcctactctcgctaccgcgacgattttggtaaccctgtacatctggaatgatgtgttttattcgctgtttatcctgtcgggcaagatggatctccttcctttgaatctgtataacgtggctagcgccggcttatatctcaacaattggcatttgattttcgcttacatcattttgatgagcctcccgctcctgattattttcgcgctggctcagaagaagatcattagcggcattacaggcggagccgtgaagtagatttgtgggtgagatatcgatacccacctacaaatccgtccagtagtattttcggtgcttttcatcattgaatttggaactatatgatgaataggtacggattttctagtgggacgcgatggcgaaaggggaagtatggcccggggtgcaaggcagacgaaagcagcctcaatcaaagatgttgctgccttggcgcaagtatcggttcctacggtatcgcgctacctcaatgatcgggagcgcgttagcgacgagaaatgtgagaaaatcgccaaagcgatagaaatgctagggtataggccgaatccaatcgctcgagccttggtgaaggagcggacaaaatcgattgcggttctgtctacgaatacgacgctgtacggccaatcgcactgcattgaaggcattgaagaaagtgcaagagctgccgggtattcgttagccatcgagattttgtcggacaccagccgtagcaagcttagggcaagtgtgcaatcaagcttggatcaaaatcctgcgggtgtgatccttctcaacttcgatcaggtgggcaacgatgcgttcgcatatctgccatccgacctccccacggtactgattgccggtgggcgggagaaagagacggcccagatttcattgtgtgagagggaaagcgggtatgagctgactaagtatcttctttcactgggccacagaaccgtatatcacgtggcgattcccggtgatggcggtgattacacacgtcttagcggatggcgccgagcgtgcgaggaggccggcgtgccgaccactgttcccattgaagctggatggaatcccgagagcggtcgtgagatcgggcgaaaactcggtgccgatccggaggtaaccgcgatttttgcgggcaatgatgagttggctatgggcattatccgtggtctgaatgatgccgggcgcaaagtgcctgaagatgtcagcgttgctggattcgatgaccatccgattgggagtatctggaatccggaacttactacgataaggcaggatttccgtttggtgggcatgaaatcctttgagcttcttgaagccaagatcaatgaccttgtggaggggaacggacatacggagaactggaatcgttatgtggagattccaggtgagcttattgttcgtgaatccacgaggagtgtgcgttaacgacaacggtgactgagcatcttgagtgagttgaacttttcagggtggcaaatgagtgccccctgtttgtgcgtatttgatgttgtgaatcctggttcgattggtgggcgtcttctcggtttgcggatgaaattgtcgtcacattggaaccccaaccggaacgtaccgtaaatgagactgtgctgctgcgccgctgatggaagcggttatggggtaatgcgaacaactcctataccgtcggcgtggccagcgtggcactgtcggtcacgccgacgggattcattacccctccttctttcggtcttccgccaaagcttgggtatatcgggtcctgttgtggaatcgacgagattccggcgttcgtcacaatcgctgtatacaatgaattccgcaactttgcctccccctcggaaggatgacatgacaatgctgagtcttggctactgcatcttgggcgtcatgctctgcattgccaccttttttctggccaaaaaacaccccaatcgcatttcgaacggatttattctggagctggccgtcattcttcttctcgaaagcctccttggtctgacggcagctcacatgggggcatctccttggctgatgggcgtagcttacgtcctcgcatacattcgtccggttctcttcgtaattctgggattcgccctgttggtcaacggcgtcatcggggtgcggcgcgaaggtttctcccttaccagtgcgcttcccttcgcttggggtatcatgttgctcctttccggttactggttcctttgggggccggggcagggcatgtcgggctcggagttttacgtccgcgttatgaccttcgtgagcatgatggtgaactacattcctatcgcgctctttggcgtctggttctcgaacgacatctgctataagtccggcaaggctcctgaaaccgaatacatcattgtgctgggttgtagcattctcgacgacggcacggtcacgccgctgctgcgggggcgcctggatgcggcgatcgcggcttgggagcaaggcggacgtcgcgcaacaatcatcacgtccggcggtcagggccatgacgaggtgatttccgaaagccgtgccatggccaactacctgctttcgcagggcgtaccggaaagcagcattctcttggaagacaagtcctcaacgaccgaagagaatctgaagttctcgcatgccatcatggatgcccgcggtggagccgcacattgcaccattgccacgagctcctaccactgcctgcgcgctgcgatgttcgcacgacgtcttggcatcaacgcaagctgcgtaggtgggcacacggcggccttcttctatccggcggcgttcttccgcgaatatatcgccctgattatgcgtaaccgtcctgccgtcatcatcttcttcgggctcgttgtcgttcgctttgcgctcatgctgacggatatcgttccggaaggcgtcttcttctaaccggaggtggacgcatacgggaggatccgtatgggttggtgagcctgccaaggcaagtgtgtttggcctgcaacgtcatggggaagagcattggcctgtccatatggaacatcaacgacgaatccgacaagacgatgccaatgcataagtttcatcatccggcgtaggtggcggagccttcaccggcaaggcaaatagtcaatccacgccgttcgtgactctcatccatgtcgagtcccgtggtaacgagccattaattttcagagggcttttctttactggcacgtaacagtgcggtggtgagtgtgacggtcgattccggcacaatcttgggtaatgacaacgtgaatcaaaggtttttcgataagagaccttatcgttggttgtttttccgaagcgtcatgaatcgaggtcactatggcacagcagattaccagcctgctcgacgacccgacacagaccgtcagcctcgacacgttcagtgggctgaccaaagggtgtccggcaccattctggttgtttcagggagtatgcggcgcatggggcatcgaccattcccgcgcccagctcaatctcatcaccgtctccgaaaacgcaacgttcctgctgttgcttgacggcgagccgcaaggcgtggtgcgcgtctcacagcccggctacgtgggcggaccggaggccgtcgcctcggaaatcagttggctcaacgcgttgcatgacatcgatggcatcagcctgatcaatccggtacccaccgtacgcggcacgttcgtgacgaaaatcaacgacctcaacggaatcggctggacggtcatctcgaccaaatacgtggaaggtaccgtgctggaggatctcgacaatcccgcaccttactacgagaccatcggccagtgggcggcgaagttccacgaacaatcccgtaactggaataagccatacggctttacccgtttcaactgggacctgtcgaacatggtcggtccggccccgcgttggggacgctgggaaagtgcgaatctcaccgatgacgagagggcattgtgcgacaccgccctatggaaggccatggatgtggtgatgaaagtgccgcggaccaacgacacctggggactgatccacgccgacctacgtccctcgaacgtaatccgcggcgacgatggcagactgacggtcatcgatttcgacgacgccggctacagctggtacctctacgactatgcatcctccttgagcttcatcgaacatgaatcctacgcgcccgacctcgccaaggcatgggtgaaaggctatcaggcggtcgccggaacattcaccgacgacgaactgcacatcatgtcggcactgtcgatgatccgccgtctgcaaatgctcggctggaccaccaaccatcgtgaggacgcactgcctgacggcctggcggctcaacaagcccccggcagcgtgatgtgcgccaagcggtaccttgacgatccgctatggctgttgcactgaacggcaacgcgttccaggaatttgataactgaatatccaaccgaatccaacaaccacaactgaacgaggaaatcaatggcataactcgccgaacagtaagagaggaaggcgattgcaatgacggcatcaaccgtttcgggaagctccataggcagcgtgacctatgtggaaaccgacaaggactatttcaaaaaacgtcaactcaagcggaccgcgggagcattcggcctatgggccatcggcatcgcggcagtcgtttccggcgacttctccggatggaacggtggcatagcgcaggccggctggggtggcatgctcgtggccgccctcgtggtatacctcatgtacgtactcatgctcaattccatcagtgaaatggcctccgccatgccacacaccggcggcgcatactcattcgcccgagcggccatggggccatggggcggcttcttcaccgggcttgcggaaaccgtggaatacgtgatgaccgccgccaccatcgtctacttctcttcggcatacgccgacgcgatcctgtccgacctgaccggctactcgcttgacgaccacggtttgcgttggatctggtggctcggcctgtatgtcatcttcgtggtagtcaactggctcggcgccgaaacctcattccgcttcgccgaagtcgtgtcgattgcggcgctcgccatcgtagcgctgttcggcatcggcgcgttcgtaacgggcaaggccgacttctccacactgctcaacatcacgccgacggacggcaactccgcattcctgccgttcggaccgggcgccatcttctacgccatgccgttcgccatgtggctgttcctcggcatcgaacagctcccgctggccgccgaagaggtgcgcgaaccggaaaagaacattccgaagtcctcccgcctgtgcatcttcaccctaggtctgtccgcactgatcatcgtgttcctcaacccggccgtggtcggatccgaggcgctcgccggttccgatgagccgctacttgacgggtatcgtgcgattctgcccggcaatcttgccgcggtgctctccgccttcgcgctcatcggcttgctcgcttccatccagggcatcatgttcgcttacggacgcaacctgtattcgctgtcccgcgcaggctactatccggcgttcctgtcgctgaccggcaagaagaaaacgccgtattggggcctgatcgtcggcgccatcatcggctttgccgcgctgttcatcatcgcctacggcggttccggcgcaggttcggtggtacttaacatcgccgtatggggtgccgtgctggcttacctgctgcagatggtctcctacgtgttgctcaagaggaacatgcccgacatcaagaggccgttcaccagccgcttcggcgtaccgggcgcggtgatcgcgggactgctggccttctgcatcttcgtggcggtgctgctcaaccctgactaccgcctagccgtctacaccatggtggccatctacattctcgccaccatcttcttcgcggtctacggccgcaagcatctggtgctctccccggaagaggagttcgcggcatccggaggcaaagccgaatacaagaccgaggactgaacggcaacacctcatcggataacggcatgcatcgcgtggaattcatcaatgcgggcatgccgttttccatggagtcgaatctcggcaaaaggtcaaccaaatacacaaaaaatggcggaaatggtttgtttccgtactgtatcagtccctcaacaaagctgcgttaccgtttgggtaatgccaaggagagccaacgaaagaaggaatcatggccactcgatcaaccatcatggacaccaacagcttccgtccggagatggcggacgcactcgatccggcaacgcgcaagctcaccgaggaacgcgacgtactcggaccggcttaccgcctgttctatcgcaatccggtgcatctggtgaaaggcgtcgggtctcatctgtgggatgccgacggcgaggaatacctcgacgtgtacaacaatgtggcatccgtgggccactgccatccgcgcgtggtcgaggcgctgtccaagcaagcctcaatgctcaacacccacacccgctacctgcacgagaacatcctgcattatgcggaagatatcctttccaccatgcccgacgagcttgaccgcatcatgttccagtgcaccggctccgaagccaacgatctggccatacgagtggcccagacctacaccggcggcgaaggcgtgatcgtgacgcacgaggcctaccatggcaactccgccctgacttccaagctgtcaccggcactcggtaccgcacagaccctgggcctcacaatgcgcatgattcccacccccgacacctaccgtctcgaaatcgacgggaaagcggccgccgaatgcaccgccgaggaattcggcaactggatggcgggtgaggtacgcaaggccgtggccgatatggaacgtcatggtatcaagttcgcggcactgctcgcggactccatcttctcgtccgacggtgtgtatccggatccggtcggttacctgaagccggtcatcgataccgtgcacgagcttggcggcgtgtggattgccgacgaggtgcagcccggcttcacccgtaccggcgacgccttctggggcttcgggcgccagggcatcgtgccggatctggtcacctccggcaagccgatggccaacggtctaccgacctcgctgatggcggcccggcacgaagtgctcgaaccgttcgccgggtccatcccgtatttcaacaccttcggtggcaatccggtatgcatggccgcggcccaggccgtgcttgacgtgatgcgtgacgaagacaccatgggcaatgccaagaaggtgggcaaggtattcaaggatgccgtcgcctcgctcatgccgtctcatccgtgcatcggcgacgtgcgcggcgccggtctgtacatcggttgcgaaatcgtcaagccgggtaccaaggagccagatcagaaagcggcgctcgatattcttgaaaccctacgtgacaatcacatcctcacatcggtgtgcggccgatatggcaatattctcaagctgcgtccgccactggtgttcagcgaatccgacgtggactggttcatggatggattcaccaagacactcgaaacattgaaactgtaaaacgaaaggaaatgcagcagggagggcacggatatggaagatcgcatcgacgcaggccaaggaaggctggcgacgagtgagctggtctaccgtatccgtgcccttatccgtgaccgggaactgcagccgggggagagactcggttcggaacgggcgctcgcacaatcactcggcatcagccgttccgacctgcgtatggctctggcggtattggaagcctcccatgaggtcatccgcaagatcggccgtgcaggtggcatcgtcgtgtccgacggtcggctggaacgtaacatcaataccgttgaatcgttgccgaccattgcaagacggcaaggcatgcgggtctcgtcgaaggtgttgcaggccgtgatcgccccggcttcgccttccgacatacggttgctgaaactgcccggcgagcatccgatggtctacgacatcacccgtctgcgctatatcgaagaccagccgctgtctttggaacgttcgcacctgcccgcatatctgtttccgatgttcctgacgcgcgatctgaccacgccgttctatacgatgttcgagcgtgactacgacgttcgcccgtatagcgtggacgagacgctggaatcggtggtcggcgacgctcaggagaacgagttgctcgaaatcgagccggagacgccgctgatgcgcatccatagaattgcgttcaccgccgaaggaacgccgttcgagcgggccatcgacgtatacgtcgcggatcgtatgcgcttcaccatgcatcattccggttacgtgcggctttccgccacgcatgggtcggcaaaatgactgaaatgggttgattgcccggctgggttcgatgcaatccaactgattccggttaaaatcagctgattccaacggaaatgatcgattcacaacgaatactgccgtatctgcaccggtaagtggtccattcccgtaaaaactgtcttatctatgatgttcagtgatggatttcgaccggtttctgtgggaatcaggtggtttttgcgggaatggaccacttatcggcgggaatcaggcgggaatcaggcagggcgtcgaaacgggacgatcggatcagacgatgcgacgatcggcggcccaacgggtgagctcggtacgattcgacagctgcagcttgcgcagcacggagctgacatgcgtctccacggttttgatggagatgaacagctcggccgccacttccttgtaggtgtagccgcgtgcgatcaggcgcatgacctcctgttcgcgattcgacagacggtccagctcatcgtcgtgaatcgggccgttcgcaccaccggccgccatgccgccggaaggcgcactctgaaaggcggaaagcacgaatcccgccagcttaggcgaaaacacggcatacccttcgtgcacctgtttgatggatgagatcaagtcgtcgccggaaatcgtcttggtcacgtaaccttgcgctcctgcgcggattacggaaccgacgtcctgcggcgaatccgataccgacagcgccagaaacacggtattgggggagtaggcccgtgaccgggtgagaatttccgcgccgccaccgccttcgccgcccggcacgtgcacgtcaagcagtaccacatccggcttggtctgtgcgatcatcgccactgacccctcgacatccggcgcctgcccgacgatgttgaagtgcggttgtaatgtggcgatcacgcccgcgcggaacatctcatgatcgtcgaccacggcgatgcggatcggctgctcctgctcgttcattgctgctccttgatttggcttgcgtcgggttcaccggctttggattgcctggcgacgatcggcatatgcatgcgtacctccgtgccccatttcggtcgcgacacaatctccactgtaccgccacgccgtttgatacgtccgatgatcgactcgcggatgcccagacgattcgcgggaatcgtagcgatgtcaaagccttcgccgtggtcacgtacgaacacttcgaccatgtcatcacccgcttcgcaatacacggaaatcggttctccgccgtgggtcacggcgttgatgagcgcctgctgcgtggcgtcgagcagcgcgtcggtctgcgcgctcggctgtgcgtcgcctaccgtcaccacctcgatcggcttgccatgcgtatcctccacttgcgccgcgatctccttcaagccggcgttgacggaacgatctgacgtagtgcgttcctgatacagccattcacgcagctcacgctcctgcgaacgggccaacgagaagacggtctgctggtcgtcggcatgcagttggatcaacgccaacgtctgcaatacgccatcatgcagatgagccgtcatgtcggcgcgttcctcctcacgttccttcaacgcgcgttcggtgccgaggtcgcgaatcagcgcgacgatccatggtacgatcgccagcatcccgccgaccagcagtgccagacccgcgatgatgaatgtccatgtcggatggcttgaaccgggcaggtagcgcacctggccgaaaatatagaccacatagccgatgaaaatcagtgcgatgccgccaagcatcgtccacaattgaccttcttccgcgttgtagcgcagccaggatacgccgatgccgatggctccgaacagtagcggaagaatgagcatacggtcgatgccgctgagcagcattgcgcaactgacggcgagcagcatcaggccggtcaatgcgatcaacgcgggtttcggtgcgtttttcagcagatgttccaggctttccccggaggatcgcgtgtgctcgacatcgtcgacatcgtcggtttgcatgccgtcgaattgcgattcgtccgtcatcgtgcgcgtcgtatgccgcgcgatgcctgcgtatggcgcgttgccatgggagaggggtgaccggctgattggctgctgttcggccagccagtatgcctgctgcacggggtcgcccaatggaacggtcagccataggaagacgtaggcgatgacgcctgaaccgaacgcaaacgtcgaggcgatggcgatcagacgaatcagcccgaccgacacgccgagatgcatgctgatgcctttgcagacgcccgcgaaccagcgtccatactgcgggcgcatcaatggcaggcgggcgggtctgatcggcgcggactcgtgcggatcgcgattggctaggcagtagcgggcatacaccgaactggcgtagtcatactcgtattgcgtatatcgcggtgctccataggacttcatggttccattgtgccgtgtgggggacgccgaatcggggctttcatctcgtgttcagggcagattcagggtgttccccgataagtatggcagtcgcgggttggtgtaatggaaccatgagcaatgtacaccatgatccgcgaagcaaccagtggaacgcgccgcagcggcctgcaggccagccgcaaccctcctcgtccaaccggttcttcgcatggattcgaaaaagtcagctgaagcgagggcgcgaccgttgggtcggcggtgtctgcgatgggcttgcccgtcgtcttggttggaatgtggcgttggtgcgtgcgctggtgattctcacctcgctgttcttcggatgcggcgccgccttctacggcatggcctggttcctgctgccggacgagaccgacgaccgtatcctgtgcgaggaactgatcgcaggccactgggattggagctgtatcggcgtgttcgtgtgcatggcgatcgccatctgcctgcccggggcgggctgggtggcctttgcggtggcggcactcatattgtggctgatagtaaatcggcagacctatgcgtcggcttggcagcagcaggcgcagtatggtccggtaccgcacaatccttacgttctcggcgcgcagggtgccgccgggccgatgccaccgcaggccccaccgttcgtggcgacaatggacggaccgaagccggtttcgccgtggtatcaacgtggcatgccgcaacagcagggagtcccgccgtacgattccgtctatcggcaggggcctgcgggcggtacgggtgacgtcccgccgcaagcccatgtgtcgcagcagccgatgaacgggccggccgcgttcgccacggccaacgtgccgccgactttcaccgcgccagccgccccgatcgaaccgcagccgcgatacgggcgcaggaagccggccgggcccttcctggtgcttatgaccttcggtctcgcactgctcgcggtcgccggactgtactggtatgacacgttcgacggttccaagaccagtcagaacatcattgcggacaagctgcaggtgacgacgctggttgccggtggattctgcctgctgatgggcgtgatcatcatcatccttggaagcatgggccggcgtgccggcggcctgcatccgctgacgtggctcgccgcgaccatggccgtcatcatggtgatatgtaccggaacctattccatctgctggtacaggttcaagcagaacgacacctaccagaccgtcgcgcttgcaggtaccaaggtgatgggctcgtccgccgcgcagatgaagcgatacggcaacggcatcgccgtcgtcggcaacgactatgacagcgacatactgcacatcgacctgagccagtatggcaagaacaatggctcgcacaaggtcaggctcaacgacggcaccatgggcgacagcacctgcccgacgggaacgatcaatatgaccgtatcgagcgcccaagtggtggtgaccattcccgatggatgctggtggaccctcggcgggtacgaggacgaggattacgacgagtactccgttctggatcacatcggagggccgtccgaaatcaacatgatggatgccggcggcgccatcgacggtacgctctcgttcggttcggactatcggtccaacgccatggcggggcagcgggcctttgatacgacggaccgcgacacaggttgccggttcatacatccggacgattccacggattcggatgattcggatgattccgccgatgccacgagcggtcaacggttcgactccccattcaaggacgccgataccgacaaagccctgaacaaggtctacacccagcattggtactggccatgcctggccggggaaagcaaagccccgaaaccggatctgacaatcaacccgcatgtgaccatcggcggcagcgtcaccgtacagtacgcttcgcagaacacgctgccgaccttcaatggaaaagagacgaaatgaccgacgatgatacccgtgtaatgccggtgaacgacacggcaccggaagatgagccgactacggtattgccgaccgacgcgcagacaaccacgatgccgaccatggaagacacgccggattcggcggcgaccgtgccgacgttcgaacagccgatggaacctgccggccatcccatgggacagaccgcaatgccggtgagcatcaccaaatcgaacggcgatctggtgatccgcccctcaggtccgtcaggcgcgaccatcgccctgggcgtgtgcatcgcgctgatcggtgtggtgacggtgatatggggcttgcaatccccgatgaatctatggggagtcgatccgcaactgttcgtcgtcggcaccatcggcgggctgggcctgatactgatcgccgtcgcgttcgcatgggcgatcgtcaaactggtgcaggaagccaaggccgaacgcaaggcctccgagtccgccgatggcgcggccgaccctcacgacagtcgagcatgatgcggcagtcagccgaataatccccagaatgccagcagcgccaacgacagcgcggccgacagcgtcacacacgtggccaccgcgacatggccgaatccgacacctgcttttccatgatcgtttcggattcccgccatattgcggtggccatcatgcgtatcctcatgcgtatccgcgagatgcgcgtgcaacggccaagccgattcctgacggcggcgcgcacgaaccgcgaacacgcattcgaccagcagccacgcgaaggcaatcagacttacgatggcgccgatcactatgtactgccagtatctggcaagcaacgtcgaatcattggtgagcgtgatggcatcccgcaccacggcaaacaggtaggcgaggaatatgccggtcatgccagcggcgagtatggtgttgacggccaacgccatgcgcagcggaccggcgaaacgacgggaatcctgcgggctgcgggacatgccgacgatcagcagtatcagcgcaccgacaatcgcagccaacgcgagcaacaggcatgatgcgatgccgccgacgagcacgtccaatgtcttgatcagtgcgggcttggtgctgagcggtgcggcaatccgctgattgggctgcgcgccggcgatcatcggcgtggcccagccgtcggccgtcgtgccggctgcgacggcgttgatccaatcctccagatcatgcgtgtaatgctcctccaacggcagccccggcacggttgcgttcgaaccggtgcgcatctgatgattcgcatcgaaataacgcagtgtcacgttatcgttgccggctttgttcgcagcctgtatgagcaatctcgcaccttgctcgattggcatggcactgtctcgcacgccatagttgatgagcagtggcatggtcagcgacgtgcggtattgagcggcatcgaaatccgcgtattccaggccgatggatttgaggctcagactggtgagtcttggaatgatccccttgacggcatccggtgcgcccacggtggtcagatagctggtggcggcgagcgtcatctgctgccggcccgataccaccggggaagaggtgagaatcgcgaatgcgatgtcctgatgttcctgggtgagcacggtggcgatccatgtgccttccgactccgcatacagtccggttttcgccggatcgacgccaggccattgcctgagcgtctccaatgatcgtgcatagtcgtgcgcactggacacatagtcgcgatgcaacgccgaatagttgtcaagacgtttgtcgggcaccagggtggtgatgccggcggaagccatggcgttggcgatatcgccatatgcctcggcggatttgccggtgccggaaccatgcatgagcaggcatgccggatggccgtcgggagcgccgatcggctcgcggacgatggcgtttaccgtcacgttggccgcaagcggcaccgtgatgtgcgtttccttggtctgataggtgccttcctgcggggtgtgcaggtcagtcgcgcgaatcgcggtatcggcggattcgaccgcgatgtggtcggtgaacggctcgacccgccattgcggggtcatatccctgcccagagcgcccaacagtacgaacagtacgacggatgccatcgcggtggccgccacggtaacgccgatccttttcaacaaagcatgcacgttaggtcactttaggtcatatttcttgatgaggaaaccctcggtgccggggcggatgggcccgccctacaacgaccagctctcggcccggcagcgagcctcgtagaattcgcgatacatgccgggctccgcaatcagctggtcgtgggtgccacgctgcagcatgccgccgtcgcgtcccatgacgatgatcgtgtccgcattgcggatcgtctccagcttgtgcgcgatgacgatcaccgtcgacgtggcacacaactgcgccatgcactcgttgatatgagcctcgttttccacgtccaacgcactggtcgcctcgtcgaacagtacgatcggcgcctgcttgagcacggcgcgcgcaatggatacgcgttggcgctcgccgccggacaaggatttgccgccttcgccgacgttcgtctgccagccgtcgggcaggcgttgcgcgatttcgctgacacccgccaactcggccgcgcgcatgacctcatcatccgacgcttccggcctgccaaggcggatattgtcaatcagcgtgccatggaacaggtacacgtcctggaacaccatcgacagctgcgccacgacatccgacgcacgttgatcgcgcacgtcgagtccgcccacgcgcaccgtgccggcgtccacgtcatagaaacgggcgatcagcttcgccatggtcgtcttgccggagccggacgggccgacgacggcaagcatggaaccgggccgtgcggtccacgacacatcgtgcagcaccggtgcggaagcggtgtagccgaagcgaacacgatcgaactcgaccgcgcccggtctcgtcaccggcttgggatcggcaggttcgggcaacggtcgctcacgcatgacggacaggtagtagtccaaagacttgcgtgattcctcaatgccgagcagcatggcgaacatgtcgttgacggtgttggagaaccgtagcgaaacacccatgtaggcgatgccgacgagcggggaaagcgtgccctgcaacgtcaatgccgcgcatgccatgatcatggagaccggcagcaactggctggccatgccgttgagcagattcgcggcgacgccccagcgcagcgatctgcgttgacccgcggtgcgggcatccaacgcatccgtcaacggctggtatggatggcttgctccgcatgaacggagcgcgccttggcaggtcgcgaattccacgagtctgcttgaagcttcgaaatccagggcaagcatggcgtcatccccgcgatggagcatcatcgaagacagtttgccggcgccccacaggagcggcagcggaatgatcagcgtcagtccgatgcgccaatcccacagcagcatggccacgcacagggtaacggtgcttgcggcgccggttaccatcggcgagatcagatgcgcgaatgattggccgatggacatcagatcgtgtgtcgcgaagcgggagagtcggccggcggtgcctttggcgaaccagccaagcggcaatgatgcgattttgtcgccgatgccatgcagtgcgatggcgaggaagtcaagcgcggaattgtaggagatgacggatttgaagtagtcgatgacgccggacagcactgcgagtatggccagtacggccacccactgccagaaacccagtcccatcacggtggatgcgccgcccagcgtctgcgcggcgggaatgatcgcggcgaacgtcagaccggtgaccacaccggacatgacggacaacagcatcgccttgtcgaatccgccgacatgaccggccaaggcctctctcagacattgcaaagtgctggtcttacgcatggtatgcgccttcctgtgctgcgattcgattgtgtcgtgcgacggcatccaacgcgcgtacgtgcgtttcgtcggcaagttgctcgtgtgtgccgcaggcgacgatttcgccgcgatccatgacgaccatctgatcggcgcccactacggcggatggcttatgtgcgatgacgattacggtccggcccgcgaccaatgcgttcaacgcctgctgaatctgcgcttccgattccggatcgacgctggccgtggcctcgtcgagaatcaggatcggcgtgtccttcagcagcgcacgggcgatggcgatacgttgctcctgtccgccggacaggccgacccgaccatcgatcaccgtgtcgtagccgtgttcgagcgccatgatttcgtcgtcgatgaatgcggccttggctgcggtgcggatttgttccagcgttgcgtcgggacgccccaatgcgatgttgtcgcgaatcgatgcacggatcagctgcggatcctggagtacgaaaccgactgtgcgatacagttcctcggaggtgatgtcgcgaagatcgacgccgccgatgctgatcgatccttcggcgggatcgtcaaaacgggcaatcagcgtggcaagcgtggatttgccggatccggatggtccgatgagtgcggtcatcgtgcctgcggcgacattcagactgacgttgtcaagcgccgtggtggggccgtaggcgtaggtcacatggtcgatggccacgtcgtagccgttcggatgtttcggttgcgtcgtctcggcgagcggcgttacgcgcagattccgttcgatgcgcaatgccgcagcgccggcgagttgatagctccactgcatattgccgatcgtggtgatggtggatggcagcatcatggcggtcagcgtggcggccaacacttgcggcgcggtcacatagccggcctgtaccagcagcatgccgacggcgagattgatcgcggtaagcagggcgggggcgatgaatgcctcggcgatcgcacaccaacgaacgagcggcccgcaccaatcgttgtactgtttgatgaagtcgtcggcggcgcgctcgtattgccgcagtgaatgaccgctgcggccgaatgcctttaccacggcgatgccactggcgaattcgaccatcgtactcgacacgttgctgatcttcgtgtccatcagcgcggtcttctcgctcatgccggccatgctgaacatctgaatgccaaagtataggggcagcgtggcgatggagagcagggccagacgccagtccagcactacgatgtaagcgaacaatgcaagcggcgtcaccgtggccgcggtgccttccaccggccagtgcgcgaccagtgcatgcagcgtctccacgtcgtcgtgaattgatttgcggatcatgccggatgtcgatgcgttgaatgtggaaagcggtgcccttccaagggaatccgccatggctcggcgaatgccggcacccagcgtgcagtcggcgaaatgcgtgatggacaatgccgcgaaatagaggaagctgcgcaacatgtatgcgccgaccaggatgaacacataccgccatacggtgttcgcatccggctgcgtatgctgttgccaagcgcgcagcagcacgtctccgatacttaccagcgccgcgtagggcgctacgctcagcagacctgagatcgcggccagcgcgcgcccgcaattcaacctgccttggatgggcttcatggctctgttcaaggcggccttgccctccactgcctttgccttgtctccggtttgcgccgtggactcgtcggcgacgtcatctgccacggttggttcctttctatgcgcccatctccttgcgcggggatgttccgatggtgatgtgcatcataacgtaaaatgagaatgattctcaataataatataacatgatgcctatctcgaaacaatttcaggcagtcttgcaaagctggatttcagacatactccacccttggaaagactgcctgaaaattgtcgtcacggaaaaaccgtgacgatgttcatcgtggcaatgcttgcgcagaaagtcaataccttggtatcgaaaaccatgaaaaattccgaatggtgatgttccggcccgcgactgccggaatcatcatcggggtcagacgtggacttcgcgcatgcgctccatcgcctgcgtatccgtctcatagcggcgcgtgtaggttatcaggaacatgaccgcgatgatggcgatcggcatgccggaaagtccggtgtaatggtaattcatggccgtggcggtcagtgcggcaccgccgacgatcgaaccgaccgcgttgccgaaattgaaggcgatttgcacggccgcgccggcgatgagttcgccaccgccttgcccggcctgcaccatcagcaactgttgcggagcggaattgaagaacagggcgaagccgagcacgaacgtcagcatcgccgtggacatccggtttcccggaatcaggaagaccagcagcagaccgaccaccgcaatcgactgcgacaatgccgccgtcgcggccggcttccacagatcggtcaggcgtccgccggcgatgccgccgagcaccatgccgaaaccggccagcaccataagcaggggaaccgcggaagacgaccatccaccggtcttctgtagccagggggagatgtagctccaccagcagaagatgccggaattgccgcagaacacggccaacaacacaaaccatgggcccgagtgagtgaggaaccggaactggcccttgatgccggcatccttgatcggaggcacgaacggcacccaggcaagcgtcagcagcatggtcatcgcggcccaagcggccaaaaggccgaatgccacacgccaagacagcatttcggcgagcagggtgccggccggtacgcccaacatgttggctaccgtctgaccggtcaccatcatcgagacggactgcgcctccttgcccttatcggctagggttttggcgatcagcgtggccgtgccgaagaatgcgccgtgcggcagtccggaaatgaaacgggctgtcagcagcatgggggagttcacggcgaccgtgctcaacgtgttgccgaccagtgcgatgatcatgaacaggatgatgaggttcttcggcggcaccttgcgtccgaacaccaggatcagcgtgccgaagcatacgccgatcgcataggcggaaatatagtgtccggcggctggaatgctcacattcatagcggcggcggtctgcggcagtatgcccatcatcacgaattcggcggcgcccagaatgaaggcgcccgaagccagggccagaatgcttctcttcaaggtctctcctataggtacgggcatacagcgtgcgcgagtatgtacaacgtttgaaccaaatgtcattttaggaataccgtcgaccagtgcggcatgcgacgacaccggtgtcgtgcgtatgatttgacgatttgtgcgcctgtggattcgggggcctcagattgcgtttttcctataatggatcaggtgatgcacatagccgtggtcgaagacgatgacgaatgcgcgcaggcggtgacgcagtgcctggagcgcttctcgagcgagcacggcgaacccatcgaaaccacggtgttccgtgatggcgcggcaatcgtggaagactatcggccggtctacgacattgtgctcatggatatcgaaatgccgggcatggatggcatctcggccgcgcgggaaatccgaaaaaccgaccgcgacgtggtcatcatcttcatcaccaacatggcgcagtatgcgctcaaaggctacacggtgcaggcgcgctcctacatactgaagccggtcaactactacgggctttcgatggaactgcaggaggcgatcgattacatcaatcgcaaccggcgccagaacggacgcgcgttgcttctgccaagtggcggaggcattgacagggtcaacctgagtgacatcacctatatcgaaagccaacggcacaacctgttcatacataccaccggcggtgtgctgcgcatacgtgagtcgatgaacgccatggaggcgaacatcgacgatccggcattcgcccgttgcggcgtgagctttctgatcaatctggcgtgggtcagcggcatcacggaaggcagggaagcactggtcggcggcgaccgggtgccgatcagccggcagaaatacaaggatttcatggcggcgctgagcgaatatctgggaggcatccatgattgacgtgctgaatctgccatcgttgctgctgtgcggcatcgcggtggagatggcgttgacccccgcggtgcttccaacggtcgggccccgcgacatgcggcagcgcaatggcgtgcgcctagaaccgccggccggctcgcgcatggtctggtatatgggcattgtgatcggattggcgttgtctatggcagtcgtgatctgggccaaggagacgctggtcgacttcgacacgaattccaccgcattggaggcgccgatctgcctggccgtactggtggcgttcgccgtggtgccgttgcgcagtggcgtggcgcagggcatctatgaggcgatatgggcgcaggtgatcgcctccctgagtttcgaatgcatggactgcgcgaccatgtggcttcccgatcccatgcgcgtcatcgcactcgggatgcttacgccgatcgttggcgtggcgctgttcgccgcggtgcggatgcggctgctgccgcagttaaggggcggtcgcggcggtgccgtaggcaaacgcaaactgctgttcgcggtgacgctgtgcatcatgttcctgctgctgtcgaactatcagatcatcttcctattgctcggttcgcgtgagcacacctatatgattcccgcattccgcatcatggtcgaactgctgagtctgatcacgctgtacctgcagaacgacatcgaacaacggcagcatgcgcagatggaactcaatctggtgcaacgattatggcaaagcaagcaacggcaatatgagatctccaaggagacgatcgacctgatcaaccgcaaatgtcatgatctcaaataccagctggcggcattccgcaccatgcaggacgacgcggagaccgaccggcggttgggcgaagtggaacggtcggtgatgatctacgattccgcgatccagaccggcaatcgtgtgctcgacgtggtgttgacggaaaaatcgctgtactgcgaagccgagcacatcaccctgacctgcatggtggatggcgcgaaactcggattcatcgatcaggccgacctgtatgcgctgttcggcaatgcgctcgacaacgccatcgaaagcgtgatgaagcaacgggatccggccaagcgtgtgattcaggtgtcggtctaccccgacaacggctttctgatgatccgcatacgcaactactgcgacgaaccgatcacgctggtcgacggcctgccggccaccagcaagaaaaccgacaagggctatcatggctacggattgcgcggcatccgttatacggcggaacaatatggcggcacgatgagcgtgaagatcgctcccgattcctttaccctgcaggtggtgttgccgctgaattgaaaaggtgcgaacccggggcagcgggctcgcacctgtgttggttacgggctgtcggaggattccgtcagcgcttgatggccttgagcatcacgtttttcagcatgcaggccacgaatatgacgaggcagacgatgaatgccgtaaggcatggccccatgaccgtctcgttcgttccggaggtgagaatgtatccgatcgaccagctcagaatctgcacgttcgccacggcgagtacatagactacgccggcgagaatgccgatggaactgctggccacgatcagcagcagccagatgagattgagaatcggggaatctttgagattatgctgcgcattcattgcggttcctttcgaggatgcatccgttacttgccggaggtggtgacgatgggctgcccgggtgcgcaccaggcgcgtaccggcaggcagatgaacagggcgagcgtcactaccgcgagcaccacgtcgccgacaatccacatccattcccagttcacgtcatacttgccggagacctcggaggccttggaattggcgtatacgtagaggatgttcttggcggcgcgttgcatgttgcggatgccggcgtcgcttttgagaatggcgtcggtgtagccgcagtcgccgctggcgcgggtgagcatcatgtcgttgccggccatgatggcatagtccggaagcatgtagtagctgccgccgggcccgacgccgtcggtgatgatcttgcctgtgaagccccattcgtcacgtggcagttcggtgcacaatgccttggtggcggagctccaggaggtgccgatgcgggagagttcggtcatcaggcccgtgcagtcggcgttcttgatggccagttcgaacggacgggcgtagacctcgcgcagggcctgctcgttgcaccagttggcggcaccgtctcgattggtgtcctgcgtgttgagcatgtagtgcttggcgtatacgtatgcgccttcgccctgcatgccgctcacttcggccgcgcccatcaggccggagagggtcggatcttcggagaagtattcgaagttgcggccgccgaatggggagcggtgcgtgttcatggccggcgcgtacataccgacgatgccccaggagagcgcctcatcggcgtaggtggagcccatctgcttgaccagttccacgttccaggtcatgcccatgagcacttcggaggcataggcgttcatcttggtgccggagaagttgaaaccgttgagtccttgcgggccgtcgatgtcggtggtggccttcttgccgaccgattcgatggcggaggtctgccaaccggcgttgccggtcagttcgacgagttcgtcgacgctcatctgctgcacgagcttatcccacttctcgtcgttgtagtccacgccggtcatgtcgtcgaccttgaggccgttgtcggcaccggtggtcggcgtcgcattgtcggaggcatcggcattgtcggaggtcagtacggtggaacccggcccgttggcttcgaggcgttccttgaccttggccgggatcgacgtcggattcaggcggtgttcgactttcgggaaggtgcccgccagatccgcgcgcgacagataggtcacgttcgtttcgagcgagccggcgtcctggaactcctgctgggaggtggcggccaccttgtcggtggaacgcttgccatcatgggcgtcgtcgtaggtgatggtgttctccaccgtgtaggtgaaggtggcgtcgtcgttcttcacggtgtgactgtcggtgcgcagggtgaaggtgtagtcgcctttgtccatcacgtaggctccggtacccttgtagtcgaaggaggccatgtcgtcgaaggtcatggtcagtttcacttcgtcggattcgccgggcttgagttccttggtcttggcgaacgcgccgaggtccaccgcggacttttcgatgccgcccttggtgtatggggcgctgtagtacagctgcaccacgtccttgccggcgacgtcgccggtgttggtcaccttcacggtggcggtcacttcgccgccctgaccgtcgacctggtaatcctcgagctgccagtcgaaggtggtgtagctcaggccatagccgaacgggtactgcacgatggaatcataatcgccgtaatcgtagacggtgccgtccgaggcggtaatcacggccttgtcggctgcggcggtctcataccaacggtagccggtgtagatgttctctttagaagtacttgtcgctcatctgttgctggtaatcggtgtaatagcaatcgcccatgttgtagtaggacggggcgctcttcacgtcgtaggcgtaggtgtccacgagatgaccgctcggattgaccttgccgagcagcacgtcggccacgccgcgcatgccggtggcaccggggcccgcgatctgcaatgcggcatccacaccggcatcttcaaggaagccgagttccatggcgtgcgacgagttcacgagcacgatcacgtgttcgaaattcttttccacggccttgagcaggtcggtttccgcgctttgcagttccagatagcttttgccggcgtccccgccgatcaggccttcgccggattcgctgtctgtgacgcccatatccatcggcaggtcgccgccttcgccacccgcacgggagaacacgactacggcggtgtcgctgtaccgcttggcgccgtccatcatgtcgagcacatcggtgcatttcgcgtcgtagatgttgtagtcgccgccgttgggggagaacacgttccaggagcctgcgctctgcgactgcttggtgtagtagttccacagatcctcgttgatgctgaggccttcggcttcgaacgactgcttcaacgtgtcgttgtaggcggcgcccgacgtggagccggaaccggagccaccgtacaccaggttcacgctaccgtagccgaacacgttgatcttcttggtgtcgagcggcagtgcgccgttggtgttcttgagcagggtggcgccttctccggcgatttcctgtgtcagattgcgtgccttctgataggtggcctcgtcgccgcctgcgctgatctgcttgttgagatccagcgtggacgaaatggtgttggaatatcggctgagcgccacgttggcaacgatcatcaccatcgtgagcagtaccgtcagtaccagaccgaagacaccgaatcgcttcgatatgggatggaagaacttcctcttcatcatcactccctcaatatgtccgtttgattggattcagcggtcgggccgttgcactgcatcgtgcatgacggttgccgctgatgattccatttcagctgagaatgtgtgatttcgtgttccggccggcactttcggtacgttccgcggcacgtttggcaatcatgggatgagggaaaaatgaaaaggcggaaccgaagttccgcctgtgttgtggtcgggctggcgggatttgaacccgcggcctcttcgtcccgaacgaagcgcgctaccaagctgcgctacagcccgttttgcaacagttggatatgttacacgaatgagccatgcgcgcaaatccggcgtgtcgtgtgttgtgtattgccatctcgttacactgggggcttatgactgagaccaacgaatcccaagaacatcagaatgaagaggcccccgttcccgttatgaccacggtggaacgcgccgaaatgctgctgcggcaggatgccgcgattcgcgccaaaatcaacgacggcgcgaccttggatgaggctgtggatccgagcaacaaggaattcggctcgctggcccacccggagcaggtgcagatgcgtgtggccaagcgcgccatgatgctcaaggagggtatcgcgccgtatccggtgaccctcgatgtgaccgacaccatcgaagcggtgcgtgccaagtacgatggcaagctcgaagcgggcgacgagaccgaagacgtggtcggcatcgccggccgcgtgctgttcctgcgcaatgcgggcggcctgtgcttcgtgcagctgtccgccggcgacggtaccaagattcagggcatgatctccaagaaggagatcggcgccgactccctcaagcagttcaagcagctggtcgaccttggtgaccatctgttcatcaagggccgtgtgatcgcctccaagaccggtgaactgtccgtgttcgccaccgaatgggccatcgcagccaaggcattgcaaccgctgccggccctgcacaaggacctgaacgaagacattcgcacccgtaagccgtacatcggcatgatcgcggacgagaagatccgcaacatggtgcgcaaccgttccaaggccgtcgcctccctgcgcaagaccttcgccgaccatgacttcatcgaggtcgagactccgatgctgcagaccgtgcacggcggtgccgccgcccgtccgttcaccacgcacatgaacgccttcgacctggatctttacctgcgcatcgcgccggaactgttcctcaagcgttgcctggtaggcggcattgaccgcgtgttcgaaatcaaccgcgatttccgcaatgaaggcgccgacgccacccacgccccggaattcaccatggtcgaggcctatcaggcctacggcaattacgacaccatcggcgcactcgtcaagcagctcgtgcaggacactgccatggacgtgttcggcagccacaaagtgaccttgctcgacggcaccgaatacgatctcggcggcgaatggaagaccatcagcatgtacgattccctatccgaggcgctgggcgaggaaatcgtgccgaacggcggcccggacaatccgggaacctccgtggaacatttgggcgagatcgccgacaggcttggcgtggaacgcgacgacgtggagaaccacggcaagctcgtcgaacacctgtgggagcacttctacgaagacaagctgtacgagccgaccttcgtgcgcgacttccctgtcgaaacctccccgctggtcaaaggccaccgctccaaggcaggcgtagtcgagaagtgggatctgtacgtgcgtggcttcgagctggccaccggctactccgagctcaacgatccggtcgtgcagcgcgaacgcttcgtggctcaggccaaggcggcgctcgccggcgatgaagaggcctgtgacattgacgaggacttcctcgaggcccttggcgtcggcatgcccccggcaggcggcatgggtatgggcatcgaccgactgctcatcgcactgaccggtgccaccatccgcgagaccatcaccttcccgctggtgaagccgctgaattaatgcgaggcattaataagtaacgggcttcacgcgaggcgaaacggctgacggcccaccgggccgtcagcccgccagagccatccttacaatctgaagccgctgaattaatgcgaaaatcgcggtcggcctgttctctcgcgacggcaattccaaggcatatcttcgtctctgcgttctgcgaggtgtagcgggctctttgggagggaacggctaaactcccgcatatggggatgttctttcgccgggggagtgcggtatgctcagcttggtacatcagagcctgtgggggtagacggtatgtttggttatagaacaatagaggctgctgatgacgaaagaatcgctcaaatcattcgttcaaatttggaaaacctccatttgaacattccgggaacagcatattttgatcccgaattagatcatttgagtgattactataatagccattcggataaacgcatctattttatcgcatttgattctgaagaggatattgaaaaacagattgttggcggtgttggcgtagcggaattcgatggaatagatgattgcgccgagcttcaaaaactctatttggatgattctgccaaaggaaaaggctatggaaaagaactgatgcagatagccgaagattgggcaaggtctgcaggttacagaaaactgtatcttgaaacccatacgaatctttcggtggctttgaaattgtatgaaagaatgggttttcatcgagttgaaaagccatgttcgacacagcacggcgcaatgaatcgtttctatgtaaaagaactgtaagatgtcggcaaattacggcttatcacgcttgcgcatagcaggatctgtatctggaaattggaattatcgataataatcggcataacgcttgattggcttttttgttctgctgctgcctatgctcatcaagccgaaaatactacggaagatagaaaatatactttgggtaaacaaagataaaccaagcgacccgtatcttgcatgcatgtgagggcagggcatgtccgggaatgtggtcaagacctacaccaaacatgccgtggcgaaattcaacgccagaacgagaggccgggcgatcgacatgtgactcaccgaaaaatgggaatgctcgaaaaactgaatcccgcgcgtaaccctagaatggcactcatgaaaatgtcgacttggattcgcggcgctcgtttgaagaccctgccattggcgattgccccggtgatcatcggaaccgcgctgtcatggaagggcgtgttcgtctattcgcagggtggtgacatactgcacgagccgtgtccgttcttcggaggccaacatgatctgagggagacgaaactcggttcgatggtcggtacatgccagacatccctgtcatggttcgtactggtggcggtgctgtgtggttgcgtggcgctgttcctgcaaatcgccgcgaacttcgcgaatgactactccgacggtgtgcgcgggatggatgaaggtcgaggagccgatatggagccgggccgctcctccgccggaacactgccgacccgtgacacgccgcgtggcccggcccgattggtcgcttcgggcgtgaatcccagggcggtgttggcggcggccggaatcaatgcactgattgcctgcctgtgtggcttggtggtatgcgcgttgaccggatactggtggttcatcttggtcggcttcgcctgtctcgtggctggctggtgctatgtcggtggcaaacatccttatggctaccgttgcctgggcgaggtgttcgtcttcgtcttcttcggcctcgtcgccacctgcggtacgatgttcgccctgtccggaacggtttcgctttccggcgtctggggcgggtgcgccgagggtttcgtcgcggtgacggtcctgtgcgtcaataatctgcgcgacatcgaatcagaccacgaccatggcaagcatacctggatgacggctttggggcggtcgaagggagccgtcctgaccatctcattgctgacgatggcctcggccatggcgatcctgttccttcttgtgctttggcggtccacgttcgtcgcgaaaagcgttccagcagtatcaatcgtgccgattgcggcaaccctcatcatgtgcgcgatccatgctgcggccatcgcggccatcgcgaaggagcgctataaggccgcgttgccgctttgctccctgggatcactcgtgctggccgtgacgttcgcggtgtcgtcgatgttcatgtagccggtcgatttgcggtgcatgggcgggtctgcaagtgaccatcgcggtcaatcgggcagagtggaatcctgccaaaatcagattgttgcacaaacgtaaccggaataatcgagaaaccgttcgtttttgggcggcaggggcggtagactggcaagcatgacttacaaactagtactgctccgtcacggacagagcgcatggaataaaaccaatcagttcaccggctgggtcgacgtcccgctgaccgagcagggtgtcgaggaagccaagaacggcggccgtctgctcaaggagaagaacgtccttccggatatcgtcttcacctcgatgttgcgtcgcgccatcaacaccgccaacgtggctctggacgaggccgatcgcctgtggatcccggttcagcgcagctggcgtctgaacgagcgccactacggtgctctgcagggcaagaacaagacccagattcgcgaagaatacggtgacgagaagttcatgctgtggcgtcgttcctacgccaccccgccgccggagatcgatccgaacgatgagtacgcccagaacggcgatccgcgctacaccggcgatccggttccggaagccgagtgcctggccgatgtggtcaagcgtgtcgagccgtacttcaagtccgacatcgagccgcagctcaaggccggcaagaccgtcctgattgccgcccacggcaacagcctgcgcgccatcgtgaagatgcttgacaacctctccgaagaggagatcgccaaggtcaacatcccgaccgcaatgccgctgctgtacgagctggacgagaacttcaagccgatcaagccgcgtggcgagtatctggatccggaagctgccgctgccggtgccgctgccgtcgccgcccagggccagaagtgagcctgagccgctaaccgcattcggcaaacgaagggcgggaatccacagtgtgtgggttcccgcccttcgcgttctcctcagcattggcggaacacgagcaagtgaacgattgcggctgcgcggtcgtacaggtgcgtatcgaaaccgcacagccttataatcggcctgcctgcctcctgatctgaccggttcggatcagaccacgccatactctttgagtagcatggcgatgtcggtatgctccagtttcttcagtatctgcttgagcacggtcttctcgatgacattgagattcatgtcggtgatcggcttgccgtcgcgtagcatcaccgtggcgttgagcagattgcgcacgtcgtagaccgaaccccacacttccggcacgcctcgatccacgtcgcacagtgtgtacaccgcctccatgccggtgcgcatcgaatattccgtggtgaaaatcgtgtcgcgtggggtctccgcgaactggccgaggaatgcgaagttcaccgcaccgtccggcaccacgtcggggcggtcaccggcggaacgcggcatgaagaacgcgtcgatgtatggcatcatcaccggaaccgtgttggcatggttgtgcgccaggtcttcgatcttgtcggttggcacgcccatatggtagagccactcctcgcagatctcctcgccggtgcagtcctgcatcggcttcttcacataattgcccggcttgtcggggaatagtccgtatacccacacgcacagctgatccttcggctggtcgcggaactgctgctggcggttcagggtccagctcatcagccagttggaatcctccacggttacgatgccgccggtcaccacatggccggtgaacggatcgcgcttgcagatcttctggatgtatggcgggatctccatgtcgagcgtggtgacggtggcgctcatccacttcgaatgctcgggatcgccgcagaatacgtccggatggccgaagctcggatcctgcttggcgatgcggcgccacatgtcccagccaccaccggggcggatctgcggatcccacttggccggttcggtctgtgagcccattgaggagttttccacgcagccgccgttggtgatgaacaccagatcgttgtcgcttaaagcgatcgtgcgggtcgcgccgtcggcttcggtcaggtcgatgcgcgtggccatttttctggtcggcgagctgtgcggattgcgtacgaacgtgccggattcggcctgcttcttcagaatcgtgtcctgtccgacgccggtgtgcgggcgcgcagggcccatgccgccgccgatcttgaactcgacgttgtcgaccttgacgttgtagtggaattgcacgccgaagccttcaaggtaggtgatcatcgggaggatcattgactcgtactggttgtagcgggtgaaccgtagggcgctgaagtcaggcaggccgccgatgtggtggatgtagcgcttgatgtacagcttcatctccagcgcactgtgccagttctcgaaagcgaacatggtgcgccaatacatccagaagttcgagtcgaatacctcgtcgtcgaagaagtcggagatcttcttgccgtacagttcctcgttcggggtgaagaacagtttcatgatctccatggaggccttatcggtcagggcgaacttgccgttcgtgccggcgtcgatgcctcgagccctggtggaacggcatagcgaatagttcggatcctctttgttcagccagtagtactcgtccagtacggacacgccttcggtttcgatggaggggatggagcggaacaggtcccacatcacctcgaagtggttgtccatctctcggccgccgcgcatcacgtagccgacgcttggaatgtttgcgccgtcacaggcaccgccgggcaccgcgtctttctcgaacacatgaatatgatcgccgggcatctgtgcgtcgcgcaccagatagcaggccgcactcagtgccgcaagccccgtgccgatgatgtaggcgttcttggagtccacgccctccggcttcttcgggcgggcgaatgcttcgtaattgccgttggaatagtacatgactgcctcctttggatgtcactgccttttattgtgccgcggcatcgcgcaaaagtatataggcagaaaatagacaggatgtgtggttctaggcatgcatgtgccatttataagcgaaataggtggcctccacgcccgtggaggccacctatttcgcttataaatggcggatcagtcgatatcagtaccttcgtcgcggctcggctccttggtcgggtcgaagccggagacgatgaacaccacacgacgggccgcggagacggcatggtcgccgagacgctccatgaagcggccgatgagcaccacgtcgatgagctgctggttggtaccctgccaatcttcggactgtgccagttcgaaggtcttcttgtgcagggcgtcgagcttgtcgtcgctgaggatgatctgctcggccacctgggtatcacggtcggagagcatggaaaccacgcgatcggcggtctcgttcaggaacgcctgcatttcggcgaacagcggctgagcattctccggcagcggagaagccggataggtgcggcgtgcggcttcggcgatgtggcgggccagatcgcccatgcgctcaaaggtggccgccagtcgcagggtggaaacgaccacacgcagatcggtggcgaccggattctgcttggccagcagcttcacacactggtcgatgacgctggattccaaggcgtcgatttcgatgtcgccgtcgatgacggcctgtgcggcttcaagattctgattcagcagcgcgtcgccggcaccgttgattgccttgcgaacgctgtgtaccatgcgatcgaggtcatcggcaacagccttgagctcttcgttgaaaataacgcgcatatgacttgcctttcataacgatttcacgaatatgggtctgatgcaacctctcctaagtctattagcaaaccgtggattgcacaggcgttcctcgtgttgttccgacaaagttcaccggcgcgttcaccgtatgttcacgcggcaggtcatgcacgggcatgtcgggtgacttaaggggagtgtgcgagaatgaaagcatgttggaatccctgagcacgtggtggcgctcactgccgcaccgcgatgataatacgcggaacaccgatgacgatacgttggatgactccacgaatgcattgctttccatgcttccgttggcttccatcgtggtcgatgatgccgacgaggtggtgcgtgcgcacccttcggcctacacgctgggcgtggtgcgtgatgatgccatcgtcgaggagtccgtgctcagggctgtgcgcgaggtgcgcagggagggtggcaagaagcagtttgacctgaccaccaccactgcgcatgtggcgcaatcggcgccgagggccggcaagccgaccacgcgcgaagccgccaggcaagcgctgatcgggcaacgcaaggatgagccggcggcctcggtgtctcgtccgaattggctgaaggtcatcgtcggcagactcaatgagaagttcgtggtggtgctgatctccgatgtgagcgaaaccatccgcttctcccaggtgcgtgactccttcatcaccaacgtatccgagcagttgctgaagccaacgcaatccctggagcggcttgccgacacgttggaacgtgacggtgccaaccaagacggtgttcgggagaacgcggcgcaactgcgccggtcatgcacgcatttggagcacatggtctccgatctgctgttgctcatcaaagcgcaggagccgattctgccgacctctgataatcgcatcaacgtcatggcgcagctcgaagcggtggcggccagccataaggaggaggccgcacggcgtggcatcaccatcgatgtgagcggtgacgaatcgttggagatcaatggtgaggccgagcagattcagaccgcgctcgccaagcttgtggagaacgccatcatatattcgccggacggtgcgagcgtcaatatgacggccaagcccgacgaggacggcgagcgggtggtgatccgggtgctcgatcgaggcatcggcatcgccgacaaggagcaggagcgcgtgttcgagcgcttctaccgtggtggcaatcagaacgggcactcgcaagacggcatcggtctgggcctggccatcgtcaaacatatagcgctgacgcatcacggttcggcgtcggtgtggagcagcccggggcaggggagtacgttcaccttgacgctgccattggcgcgggcggcgcggaacgtgcggaactgaccggcgctactcaccgagcctgcggtaatcccagcgggcgaaatgctcccataggagcatgagcacgccgatgaccgtgcccgccgcacacatcgtctggccgcgttcgacatcgaagccgagcgccagcagaatcatgcagatgaccagtccgacggcccacagcgatgtgccgaccatgaacaccttgcgtaggtccacgcgtaccggcttcggtgatggcttacgtacgctggggtcgatgatcggggctaatttcatacggtcaccatacaacgcggggtaaccttgtagggtggaatcgtgaaataggcggaaggaacgcggtgttttcgatcagcccggtaccgaagcgctatgcttggggctcgaaaacacggttgcaggatctgttttcgctaccggcgaacggtgagccgctggccgagatgtggttcagcggtcatgaggaatccccctccgaagtggcgttggggccgggcgtgcatgtgccgctgccgcatgcgattcgcaatgcgccgggcatgatggtcggcccgacttgttccgagcgtttcggtccggtattgccgtacctgttcaaagtgatttccgcgcggattccgctgtcgatgcaggtgcatccggtcggtttccaggctcgtgccggcttcaatgccgagaacgtcgcgggcattccgctgaattcgccgttgcgttcgttcaaggacgtgaacgagaaaagcgagatggtcgtggcgctgacttcgttccaggcctcggtcgggttcgcgccacgtgcctttgccctgcggaacctgcatgccgtcgatcatccgctgacccgccgcatggaacatgcgttgggaggccacccgcggcattatgagcatttggaagcggctgatttttctgaggctgattcccatatgccgcttgcgtccgtggtgtggccgacttcctatatgaggacttttcgagccttccatgccgcgattacggcggatggcgatcaggcggcgggattgttgcaggcgttggtgcatgcgcgaggatcggtggcatcgacgaagtccaggatggcgttcgattatgcgattgctgcggcgcgggcttttcccgatgacgccagtgtgctgacgttgctgatgatgaacccgatttcgctggacgagggcggttccgtgttcatcccggcgggtactccgcatgcatacattcagggtaccggcgcggagatcatgacgaattccgacaacgtgctgcgcgccggcatgacggtgaagcaccgggacatcgataatctgctgcagtgcttgaactgtgcgtccgccgggccgatcgacccttccgacgcgcggctgggtacgttcgtcatgcgagacatcgtgctttaccgtccgccggtcgatgagttcatgctcgcctacggtcatgtggacggtgcgagacggccgtggccgatactcgatcgtatggtgcagcgctacggcagacttgccgattacgtaaaggccacccgccagccattgccgcatcgtggtccgcgagtggtgctgtgcaccgagggcagggtgctgtgcgacagtgaacgggattcgcgcgtgctcgccgccggtgaggcggtatttgtgccggcgggcgaaggcaggctgtccgtcgatgcggttcaggcaacgaaaaagccggaggattcctccggctcgttcatcgtggcttccaccccgttttagaggtgttcgaccacatagtcgatgcaatggatgagtgcggtcacgtcggccggttccacagaggggaatacgcctacgcgcagttggttacgccccagtttgcggtagccgttcgtgtcgacgatgccgttttcgcgcaatgccgccaccacttgggaggcgttgatggactcatcgaggtcgatggtgaccacggcgttcgaacgtgcggccttgtcggcaacgaatggcgaggcgtaatcggaatgctccgcccatgtgtacagcagcgaggcggacttggcgcaacgtgtcgaggcccatgccaggcctccgttgtcgttgagccagcgtatctggttctccatcatcaccagcgtggccacggcgggagtgttcagcgtctgatccttgcgagagttctcgatggctgaagtgagcgacaggaatggtgggatccaacggcgcacgcccggcaggtccacgcttttggcgatgccgtaggcacgttcgatcgcggcgggggacagcacggccacccacagcccgccatccgacccgaaggccttctgcggggagaagtagtaggcgtcggtctgcgagatgtcgaccggcagggcacccgcggcgctggtggcgtcgatcagcgtcagtgcgccccgttccttggagcccgtgatgcgtctgaccggcgcggacacgccggtggaagtctcattatgggcccagcagtaggcgtccacatattcggtgagttccggcaaacgataggtgcccggttgcccggcgaagatctccggttcttcgaggaacggcgccgactgcgcggatttggcgaacttggtgctgaaggagccgtaggtgccgaaggcggccttgcgggtgatcagcgaagcgcaggcgatgtcccagaaggcgctggcccctccattgcccaacacgatctcatagccgtcgggaacctgaaagaactccgacaggccttcgcgtatggaggccacgatctgtttgatgggcgtctgccggtgcgacgtgcccagcaagtggcgggcgccgtcgtcaagggcttggatctgttcggggcggatcttgctcggtcccgaaccgaaacgtccgtcttccggcagcagtttggaaggaatggtcacggtattcgtcatggttcctagggtagccagatataaggattgagcgttgcgatgaccgctaggcggactcaggatgatccgttggtaagggggattgattccgaggtaaatcttggccccggtgtaacgtgtcctatcgtgacggttttgtagctccacgtgctcgagggcgtgtgggtttaggtacatccgcgaggaatccgcaaggagtgattgatttatgaggcatgcggcgcataaagctgcccgggtttcggatgaacgtttcagtgctgcgaaggcactgttcacgtcgagccgtggttcccacaccgccaaggccgtgcgtatggttcagctggctaatggcgggggcgccgttgtcggactggacccggcggttgccgaaaaactgaacgaagtggctccgatgacccgtcgcgccatgcgtgaggccgctcgtgcggcggaacgccgttccacgattgtaacctccgcctcgctggccgccttagtgggcaccgctgccacggcggtggcgcttacccagcagaattcgatgaatctgttggtggccgatgcggctaccactaccacgcagctcaagcgcgtatccgacacttccgcagcctcccgttccgaggaacgtaccgcccttgactcgctggtcgattcctctgacgcctcgcagacttccaataacggtgaatggcagcttggtgacgccaacacgatcgccgacgtcagccagctttccaagtccaaggccagcaatccgaacgttgcggtgctgatggatcaggattccgagtcgttgcccgccggattcgattccgaacacgccaccggcgattccggcaatgcgtatgaattcagccagtgcacgtggtgggcgtatgtgcgtcgccatcagctcggcctgcctgccggttcccacttcggcaatggatgccagtgggccgcttccgcgaaggccttgggctattgggtcgacaatacccctcgccatgtcggtgacatcatcgtgttcgccgcaggccaggagggttccgactcctattacggccatgtcgccatcgtcgagaagatcaatgacgacggttccatcgtcacttctgagtgcggctccgtgatgaacggtaaaacttactcccgtacgctcacaaatgtgaacgatttccagtacattcattactgattcggtttttgtagtcagcttgtcgtacacttggttgttgatgaagaatctgactaaacgttgctcaatgcttaccgctatcgtcgccgctaccgtgttgttctccggtgtggcgcccgtggcccttgccgctgatgatgcagcaggccaaggttctgttgtcgctacacggtcgtttcccaaggtgagcgccgtgaagaagaacattctggctgaatccacctccaccgaagtcgaacaggattccgactggggcggcgtggaaagcctggacgtcccgcaaaccaagtctcaggccgaaaaggatgccgaggagcgtgccgctgccgaacagcaggcccgcgaacaggctgccgcggcagcccagcagcaggcttcccgtagctcggaccgtagtgatttgaccacggacaattccagcaacagcacttccaccgtcaccgtgactccaccggacggcacgagcgtgtccagtctgctgtcgtttgccggccaattcgtcggcaaggtgccgtacgtgtccggcggcaacaccccgtccggctgggactgctccggtttcgtgcagtatgtgtatggacagatgggcgtttccctgccgcattactccggtgcgcaggcaaccgcgggccgcgcggtcggtagccttgccgaagcgcagccgggagatatcatcgccaactcgcagcatgccgccatctatgtcggcaatggcatggtcatcaactcacagctgaacggtactcgctacgatccgatcgcttgggttttcccgggcagctacagcattcgtcgcatcttctgacgattcttgactttcgctgaaggcgtatccccatgactggggatacgcctttgtgttgcatggacggttgcaattcagtcgcgtcgctactgtcggacacgcatgtcgcgcggtattgttgtggctagaggcagtgcatagcggcgctgtactagttcaaggaggtcgtccatgattaacgacaaggcaattctcgttggcgttgatggttcccacgccagctacaaggccacatggtgggcagcgaactatgcgaagcatgctggactgacgctgcagatcgtttgcgcgtactcgctgccgagctacgcggcggtgtcgttcgacgccacgtatacggcgatgggcgatgacaacgcggcacacagcgatgctcaggagattctgtcgaaggccaaggccatcgccgatgagcagggcgtcgaggccgcgacgttgatcgttacgggagatccggcatcggtgttcgtcgaactgtcgcgcaactacaatctgatcgtcatcggcaatcgtggcaagggcggcttggcggagcgtctgctgggaaccaccagctccagcctgccggcctacgcctattgtccgatcgtggtcgtgccgtacaccgacgacgatggcaatctgatgcatctgaacaacaccatcaccaaagtggccgtcggctcggatgaatccaagtggggtctgaaggcgctcgagatcgccgccgacttcgccgatgcctggggcgccgaacttgacgtgatctctgcggtgccgaatatgaagggctcggaggatgaaggcgtcatggcttccttcaaggaggatcttgacgtgcgtatcaagccgctggaggagtcccatccgaatctgacgatcaacaagcagatcgtgcccggtccggcggtcggcgcgctgaccaaggccagctacgatcatgacgttgtggtggtcggttctcgtggccgcggcggtttcaccggcctgctgctgggctccaccagccagggcctgctgcagcatgccgtcggaccggtctacgtggtgccgcgcaagtatgtggaggctgcggaaagccgtcttgacacggtgccgagctccccggccgatgttgcaccgaagtcgcttgacgatatcaagggcgtcgaggaggtgccggtcaccaaggcggagccggaggtggtcgaggccattgagaccaagatcgacccggagcgccagtgaggcgccggtgatgcggtagcgcctccgattggggcatgacaaagggcttgtgatttccgttgtgatgggaatcgcaagccctttgcttttgccgttgtattgctcttgtccggagacgtggcttagtgcttgacggtcacgttcatgcgcaccggagtcggctcgacgtacgtgtgcttcaccgtgcatcccttgtcgatatggcgggtgatgcgctccttgagcttgtcggcgtcctcgtcgctcagtcccgcagcggtggcgtcgatttcgacctgttcgtcgaatccgatgtaggcgtcgttgtcggcgtcataggtgccgtcgacaacgattttcgcgccttcgccctcgcccagcgtgtgttcgatggcgaactggcttgacagcgccgcacagccggccagagcgatcttcatcagatcgccgggagtgaattggccacggcccttgccgaacttgatatgggcgccgtcctcgctgaatgcatcccaggaaccgtctttgttgcgctcgacccacagtcgcttgcccatggaaactcctcatcgtcttaccgggagcgccgttcgctcctcacctctactaatgtaatccatatgggttcgtttgctgcgaaacgttccgaaaagcataaggaatcgccatgtggacgggccttgggcgaatagacggcatgcgaagcttctggctgttaagctgtgagacatggctttgacatcggaacaacttgcagacattcgcactcgtattcccgcacgccccgataccgacattcccatgccgtatgaggatctcgtgcgcaggatcatgacggagggcaccttgaagtccgatcgcacgggcaccggtacgatcagcctgttcggccagcagattcgtttcgatctgaaggacggtttcccgttattgaccacgaagaccgtgttcttcaaggggttggcctatgagttgctgtggttcctcaagggttccaccaacgtgcgctggttgcaggagcataacgtgcacatctgggatgagtgggccgacgagaacggcgatcttggcccggtatacggcgcgcagtggcgtagctggcccgcacccacgccggacgatccgaaccgtaccatcgaccagatcacgaacgtgcttgatttgatcaagcatcatccggattcgcgccgtatggtggtgtccgcttggaatccggccgaagtggaacatatggccctgccgccatgccacgcgctgttccagttctatgtggcagatggccgactgagctgccagctgtaccagcgttcctgcgacatgttccttggcgtgccgttcaacatcgcctcgtactcgctgctcaccctcatgatggcgcagcaggccggtttggagccgggggagttcgtgtggaccggcggtgattgccatgtgtacgacaatcatgtcgatcaggtgcttgagcagttgggccgcgaaccgtatccgtatccgaagattcgcattcacgaggccgaatcattgttcgattacgattacagtgacttcgaaatcgtcgattaccggcaccaccccaccatcaaggcgccggtggcggtctgagcgtctgcgccagccgctagactactgaccctagtccaatctcaaggagtgaatgaaatggagcatgatagtagccgcagtggctatcacgaacccgagcccggacatgccgggcttgaggacgaggaggattggggtgacgatttccccaagaccttctcggtgaatctgatttgggcgcaggcccgcgacaaggaaggtcgcgacggcgccatcggattcgagggcggcatgccttggcgtctgccggaggatatgaagcatttcacggagcttaccgtctcgcatccggtcatcatgggcaggagaacgtgggaagcgttgagcccgaagttccgcccgttgccgaaccgcgacaatatcgtgatttcgcatgatccggcatattccgcgccgggtgcgaccgtggtcgacacgttggatgacgcgctcgacctggcccgtcaggaagccattccggatgacggtctcgaccgtagcgaaatctggatcatcggcggagcgcaggtgttccgcgatgcgttgccgtttgccgacaaggcgtatgtgacgcagatcagcatgcatgtcgacgccgacacctatgcgcccgacatcgcttcgctggcggaatccggtgcgtggcgtatggccgaggaaggcgtgtggcaaggcacgcagaagggatccgacgacattgccggattccgctttgtgacgtacgagaagaaccgcgaggagtaaatctatccatgtataccgtgatgaccgtgtgcacgggcaacatctgccgctctcccatggccgaaatcattctgcgcaccgaattcgaacgtcgtggtctggccgacaaggtcaacgtcgaatccagtggcgtcagcgatgaggagtacggcaatccgatcgaccgccgtgcggtgaaggtgctgaaggaacgtggctacgagctgccggtacatcatttcgcgcatcgcatcacccgtgacgagatcgaacgcaccgacctgttcctgccgatgaccgcttcgcatatgcgcgcgttgctccgtcagctgccgcaggccaagcgcgacgaggtgcatatgtatcgtagcttcgatccgaatctgccgaagccggcggccgggtatgagagcgaaatcgacttggtggacccgtggtatggcggggcgcacgagttcgaagtggccatcgaccagattgaagaggtcgcgccatatatcgccgattgggtcgaacggcaactgtaacgacaaagaaagcctcggagaaattccgaggctttcgtattggtggtggctccgagcggcatcgatccgctgacctaacgattttcagtcgttcgctctaccaactgagctacagagccgtgaacattaaaaaacccggcatgaccgggctatgttcgcgaccccggccggacttgaaccggtgacctccgccgtgacagggcggcgctctaaccaactgagctacggggccgttgctgctgatcgtttccgactggcaacagatagatatcttacggcaaagtcgacatcgcgcaaatcacggcgtgtcatcttcgccgcgggcgtcaggattgctgttccgattccagctgattcaacagatcctcaagttcctgacgatcctgattgtcgaacggggaatcgtaattgtcgtcgctgtagctggaactgttgaaatccacacttccgaactcccgctgcatcagattgatgaaggcgttgacgaacagcatgactacgatgatgttgatcagcatgatggctgcgctgacgatgatgccggcaacggccatgcccttgctgcgttcgccggatttgttgatctgcaccatggcgacgatggaaatgatcaggccggccagcggtatgaagaacgctagaatgaagccgacgatgcacagattgttccaacgctggtccacgggctgttcatacggttgatacacgccctgcggagggtaggactggcctggttgcggggcctgctgatacggattctgtgcgtatgctggctggccgaatgctggctggccgtattccgtctgcgggggctggggaacgtccggctgcgatggcatggtctggaaattctgcggaatggcttctgtgggctgatcctgcggctgctgcggcgcagggctgttttgataatcactcataaggcaagtctatccgatgtcggcggcaatggcacgattataaggaaagagcgaaaaaacgaacggatgccgcatgaggggaaaacttcccatgtggcatccgttacagatgttgatgccgtgcgttgttcacggcatcatgctttcggcggccttggatggcctcagtcggcttgcttccaggtctcgacgtcgatgtgatgctcaggattggcctgccaggcatcccaggcggacttcacgatgtcttcgacgtcgtacttggcgtgccagcccatttcctcgttgatgcgcttcggggagccgatcaggtgcggcggatcgccggcacggcggcccatgacggcctccttgaacggcaggccggtgaccttcttgacctcgtcgacgatctgacgcacggaggtgccttcgccggtgccgacattgaaggcgtcgtacttgcgctcatcgcggtccagatacttcagggcggcgatgtgggcgtcggccagatcggacacgtggatgtaatcgcgcacgcaggtgccatccggggtcgggtagtcgtcgccgaagatcgcaggggccttgcccttcttcagacggtcgaacagcatcgggatgaggttcaggatcgccggatcctcaagctcgaccgggccgcaaccggccacgttgaagtagcgtaggccgcagaagcggatgccgtacggctcctcgcaggcgcgggccatccactcgccgaacagcttggtctggccgtacgggttgatcggcagcatcggcaccacgtcttccggcaccacgtcgaccggcggcacgccgtaggtggctgcggaggaggagaacacaagcttcttggcgccggaatcacgcatgccgataagcacgttgagcatgccgttgatgttctgctggtagtaccacagcggcttttcgacggattcgccgacttgcttgcgggccgcgaagtggattacggaatccacgccctcggccttcatgatctcagcgaggcgctcgccggcgcccggggcggcgatgtccatgccgtagaggcgggagccttcgatgcgggtgggcttgccgtagctcaggtcgtctacgacaacgacctgttcgcctgcctgatgaagagcgtggacgacatgggcgccgatgtagccgcacccaccggtgacgagaactgtcatgttctggcctttcctatgttgagctgtgagtgtgcgggcatgcggttgcggcgaatacgtcgaaagcataaccgctgttcacttttgctcaggtttgttaccttttgaacaatttgagtataacacgtgaacatgaacgcacataatcggttcgttcctgcgtttcctctataaattagggtatgcaagaagtgatgaacacgccgaccgatggtcgggaatccgacgcaaacgcgcacaatgaacaccgtccggcgctgtacgggcgcaaggtgctttcgttcgtacgccgttccgcaaggctggacgcgcgtctgcaacgcgcatgggatgcctattcggatgcgtatctgctggatgtcaatgcgggtgagggctcgctcgatgtgcgtaagggctttgtgctggatgaagcctatatccgcgaaacctggggcaacggcaacccattggtcgtggaaatcggctccgggcagggcgagaacatcgtagctgcggcggccgccgatccgcagaccaacttcctggcgttggaggtctatgacccgggtgtggcgcatacgatgctgttggcgggtaagcaggggctcgggaatctgcgcatcgcacaggtcaacgcgccggaactgttcaaggtggctgcggatggcgcgatcgccgaagtatggactttcttccccgacccgtggccgaagatgcgccatcacaagcggcgtatcgtgcagcccgaactggcgggcgagatccatcgtacgctgcagggcgggggagtgtggcgcatcgccaccgatatcgaagactatgcgttgcatgtgcacgaggtgatggacggactggaatcgttccgtaacgacggcgacgtgaccgtgagtctgccggtggagcacgtcggcaagggcaatgcggatgaggcggccggcctggagcatgccgatttcactgagtccgcacgttttgacgggcgtgtgctcaccaacttcgaaaagaagggtctcgccgcaggtcgggtgattcatgatttcacctatcgcaaggtctgatgattacggggtgaatgtcgcgatgacgttcagccttgccgttgcaacgattttcggggcgacacgccggaggttgcatgtcgttgagattcgcgtatagtagggcgagttgtcacgcggaaacgctgaaagcgcccccttcgtctaacggttaggacaccagactttcaatctgacaacgagagttcgactctctcagggggtacttaccttggtaacaaggtggcaatggccccgtagctcagttggttagagcgccgccctgtcacggcggaggtcaccggttcaagtccggccggggtcgctggaacagaagaacgatttcgtctgttcatggctctgtagctcagttggtagagcgaacgactgaaaatcgttaggtcagcggatcgatgccgctcggagccaccacagcaagcccgcaagtgtgcgggctttttttgttttcccctatcgatatgcagcctagcgggcgaaagcccccgataatgtgaacacgccggagtggcaatcgttctttgtgtgataatccgtggttttgggcataccccctcattgtggcaatgtcattgcccctttattggatgggaggcacagaaaaacctgatatagggagtgaagcatgggtcatcaatacaaaataacggggggggggtataggtttgtcgcctccctgttggccgtagtcgctctgatagtggcgagccttatcccgccatcggtgcacgtcgccaaggccgacgacgatgcatctgccacatcggtgactcctacggtaagcgtgtcggactataccggactagccaacgccatcaaggagagccagagtgcagtgatcgccattactggcaatatcgccttcactaggcagatcaccttggaccaaggtaagaagatcacactggtctccgatgccagcgcatacgacacagcctgcgagctgacttacgcatcggccagcgacttctccttgttcaatgtcattggtgattcaagcctcaccttcggcggtggcacggaggataccaacaagctcagtttcagcaaccacagcaatggacgtctggttcaggtcggttccgctagtgacaagggaactgtgaccatcaacggtggtacgtacaacaacaacggaagcaccagcaacatgaccggtgacggcaatatcgcctacgtattcaaaaacggcaatctgaccatcaatggcggtgatttcaaaaaaaactatgcgagtgccgcttcaggcaacacgaccatcggtgtcactaggtcgggcggctcggtcgtgcgctcgtccggaagcgtaaccatcaacggtggaacgttctatcagaactataccggtcagaactataccggtcaaaacggtgaagacaacgttacattccacggtggtggtgcgatttggagtgagggcacccttatcgtcaatggcggtttgttcagtgctaacaaaagttatgcggcgaatgtgaaatccgaatacaagtacaagcgacctgccggtggcggtgcgatctgggctgccggacgcttggtagtcaatggtggaacgttccaagacaactggcagatgggcaacgaagacctgtatgggaccggcggcggtgccatctacttcggtgatggtacgaaggatacgtcatacaacggtagcatggtcatcaacggcggtacgtttgattccaaccgttccatgcaggacggtggtgccatcttcgtgacatggaactgcacagccgtgttccaacagggtacgttcgtgaacaattggtccaatcggttgggtggtgccgtgtacaccgaagaggattcagtcagttatgtgaccaatgcagttgcatatgagaattatgccggtcatttcggtggtggtttgtggctgtgcccatccggtaagggcgttaccagtgaacatggtggcatggcgctcttcgacaatgaggcgaacacccggtacgaccggaccgaaaccggtgccgagatcacccaagacacaatagatggcaagaaatacggccattcgggttcccagaacaggggagtatccggtgccggtgatgatttctccatcatgtatccgagtaagagcgagcaaacgaattactaccagctgtcggttgaatggttcaccggggaccgtgtcacttggcatgatgacggggaaccatctcagagtgctaacggctatctgtacggcgtcaatgatttgagtgtcaattcaatgaagcgactaactgaaggaaacgaatacacgagtgacgctactctcgacccaggtcctgcaaacaacatctaccatggatatggtttgaaggtcactgcgagtatgcgtgcacaacagaatgccatcaaccaggcgttcataaccttcacgaaaaacacggctcgactgtccggtggcgcgttcggctccaacggtgtggtgaccttcaccaaggtgtacgacgtcaattggaataaggtcagcagtgcggataccggcaagaaattggccggttccgagtggctgttggtcgcacagaatgatggaattgatggaaaagtcaagtccggtccagtccacctagattttggcctcgtagggaagtgcgacattactgattcgggctcgattaccccgaaaaaaggtgagtggtgccaggttccgaacgatgcttctgttactgacggctactattctgagttcaagggaaagtacgtcacggtagtcgaagacaacggattgcttgatcagaacaacaatcctggcgagttcaaggtcaaggacttgcgtgaaggaaagtattggctgaaagagtaccaggctcctaccggatatatgcaatccggtaagacttacactttcgagatcgtcgataatgagcaatcgaccatttcgatttccgtcgatgatggaaagaccaccaccggtaccgtgttgagcgacaacgtatcgattaccaatacgccgtacggtggggtcagctggagcaaggtcgattccacggacgggatgacggtactatcgggcagtgaatggaaactgcagaaggtcaacggtactgacattcaagacatcacggccgatggcaatgccattacaatcaccgactgcaccgaggccggcaagtgctccgcctcgcaggataatccctatcaggacatcgactcggccaaggattcgttcaagctcacgtatctgcctcttggcgagtacaggcttgtcgagacccaggctccgaagggttacgatctgcctgacggcacgcaggtctactacaccttcaccatcaaagcggacgatgaccgcatgaatgccaagcttctcaaggcggacggtactgaggtcactgagaacaaggtgccgaacgaccgtacgaagggcagtgtcatctggtacaagaccgactccaccaagaaggggaacggggaagacgcccgactgaagggttccaaatggtcccttacccaaaccaaggactgggaggacaaggatatcgatatcgacaagcgtaaggccatcaccgtgaccgactgcatcagcgatgacgatacgaagtgcccgacggattcacagaacccacagaacccaacggaccgtaacggtaaggctggcgaattccagctgaaggatcttgactggggcacgtacaagcttgtcgagactcaggccccgaccggattcaaaaagtccgagacgacctacacgttcgtcatcgacaaggaccataccggcactgtcgagattcggattaagggcgagaacggtgctgatgtggacggcaacatcatcacgaatacgccggtcaccgtcagcagcctgccgttcaccggcaccggtagccagacgccgcgcatgttcctgccatacgtgctgggaacggtcggcgccggtctggcggtcggtcttggcctacacgtggcccgtcgacgtatggcacggcagggctgaccccattcatccaaatcgttttcccttcgcttccgccgcagccagcggcggggcggggctgaacttacccaaaaacaacataaattgaagaaagaaggaagcgaaaccatgacattcaggaaacttttggcaggagtggccgcagcggccacgctcctgtcgggtatggcgttcggcgccggaagcgcaatggccgacgaagtcgaacctgcgaccatcactctcaacggtgagaccggcggcgcggtgaagggccacacctacaaggccgtgaggattggctcgtatgaccatgcatccttcgttcagaaggatggcgtcacctatgtcgaaagccttacggtgaacaccgaagccgcagtcgcaaccggtgcggcggccgctctgaatgcggcagtggccaagggtaccgattggaataccggcgattacaaagacaatccggtcggctatgtcgcgtcgaaaagcgactacttcaccagcagccccgacaagccgtggagcggcaatctgcgcaacttcgtgagcttgctggtcaggcaggccgatttcaagaccgctctggcgaccgtcacggcatacaccgccgacagcgacaccctcaccatcagtggactgaaagaaggcctgtacgtggtggtcgacaccaccgtcagcaacgctgagaacgttgaccataagcagactgattccatcccgatgcttgtgggcaccaaggtgaacgacaaggacttcgaaggccagacgctgggcgtggtcaacgtcaagaaccagaccacctacatcaacaaggtcatcgtcaagaacaaccaagagtgggtcggcacgaccgaacgcgtcggcgacaccgtgaccttcaagctcaccagccaggttccgctgaccgtcggctacctgaacacccctgagaagccgtaccacttctccatcggcgataccatgagcaagggcctgaccttccaggaagtcacctccgtaaccatcggtaacaagaagctgaccgaggccgctgacggtgccaccgccaccgccgaccagtaccagctgaccaccaccgccaaccagaagtacgatacgaccgacaccgaaagcaaggcgacttccctgaagttcgatctgtccaacgccgtgtatgcggctggccagaacgcggctgacagcaaagccacggccaaggccgaagacaccatcaccgtcgtatacaccgccaagctgaacaaggacgcggtccatgccgtgaagggtgcgaacccgaacaaggtcaccctcgactacacccacaacccggacgacaacaccgagcaccacgtgcccggcccggaagttaaggtgtacacctatgacttcggcttcctcaaggtgaaggccgacggccagaccagcctcgatggcgccaagttcgtcatcaagcaggacgaccagtacttcaggttcaacacgaccaccggtctgtgggagaacggcaccaagggcgctgaaccggaggatgccgacaagttcatcggaaccaacggcgtcttcgagttcaagggtctcgccgaaggtacctacgtcgttgtggaaaccgacgctccggccggctacctgtccaccaccaaggccaagttccaggtggtcatcacctccacccacaaggacaagaaaggtaacgttctgggcaccgaacacgagatcaagttcgtgaacggcaataccggcttcaacctgctgaccaacctcaatgccgacggtactgccgccgaaggtggcgcgaaggtgaagaacctgaagtccatcacccagctgccgctcaccggtgccgcaggcatcgcgatcttcggtgtgatggccgccttggtcatcggtgccggtctcgcggtcggcatgaagcgccgtggcatcgccagccgtctggcatgatcggggcctgaaacccccacgtcgatcatgaccgtaacgccgccccatacggcccatccgggccggtgggacggcgttcccgattcccaagggccgcgtatggcggcatgcgtcggaaaggaaacccatggcacagcaggagccggtgcgacggtacgacacgttgtcgttcgacgaggcgttggacgtgtcggacgtgatgcgcgaacgacgcacattacgacgcatatcgcaggtacttgccgtgctcacggtattgctgatcggcggcggtctgctgctcggcgcgtacccgttggccctgcagtggaagtcaagccgtgaactggcttcgcaaagcgagcaggtgagcaaaaaggtcgacggatggcccttcccccaagcgcgcgaccaactgcgtgccgccacggaatacaacgccaagctggcggccagcggtcagccggtcctgggcgaggcggtcgatccgttcgacatcgccaacggcagcagccaggcttccagccaatccgactccaaggcatccaaggacgccgaataccaaagtcttctggataccggcaacggggtcatgggagcggtcgagatcccgaagatagacgtcgatctgcctatctaccacggtacgggggaagaccagctcgccatgggcgtcgggcatttgtacggcaccagccttcccgtgggcgggacgagcacgcacaccgtcatcaccggccatcgcggactggtcagatcgcccatgttcacgcggctcgacgagatggtgaagggcgatttcatctacctgaaggtcatgggcgagaccttggcctaccaggtggacgacatcagcgtcatcaaaccggatgacacgtcgaagctgcgcgtggtcgacgggcaggatcggatcacgctgatgacgtgcaccccgtatggcgtgaacacgcacaggctgctcgtgtccggacacagggtggacattcccgaaccggcacccgacccgaccgacctgcatgattggcggaccatcggcatctggtcatgcgcaggcatactcacggtcggctggctgctggtctggctggtcggtcggttgcgtcacggcgtatggcggcgcatgcgtcatgcaacctgtatctatgtccacatccaacgttccggccggcaggcgagtgcgaaacatcgttaaggaggcacgatgagcaaggatttcaccagaaaagaagtcgaatatctacggtccgttcccgcagtcaaaaaggtcgcgaagaaccggatcacctatgcgcgtgcattccagttgtactgcatggccagatatctgcggggcgacgggccgaccgcgattttccgcagcgtaggcctcgatccggatgtcgtcgggcggaaacgcatcgaacgttgcatcgcacggtggaagcaggatgagcagttgatggcggaagcacagcagatgaatcccgatgcggcacccgacgtgcgtgacaggatcattctggtgcaatgcagtcagatcaaggaactgacgcagcaactgtcggaattgcagaagcgtctcgccgacctcatctacgaggtgaatgcgcaggatgcgggagccctgcctaccgacgattccgatccgctctgatagacaagcggaaggtgagaccgcatgcaacgatcatgcaggtaacgtaccgaaacttttttgggaacgttcacggaaaatttggtgtcgttgtttcggaaatccccttaacggggtttatgatgattctcgtcggactgcggcgacgatggctgtagcccccgaacacagtacctttgcttaaaggagagcacctatggtctatcgcatgattttcaaccagaccgcatacttcggccgtggcgccatcaaggagatcccgggcgtcgccaagtcccatggcttcaccaaggcattcatcgtcaccgatccggtactgcttgaaaccggtaccgccaagaaggtcacggacgtgctcgacgaggcaggcatgccgtatgaggtgttcagcaacgtcaagccgaacccgccggtcgaatgcattcaggacggcgtagccaagttcgccgcatccggcgccgactttctgatcggcctgggcggtggctccccgcaggacacctgcaagggcatcggcatcatcaccgccaatccggagttctccgacgtgctctcgcttgagggcgtagcagacaccaagaacccgtccgtaccgatcttcggcgtgccgaccaccgccggcaccgcgtccgaaaccaccatcaactatgtggtcaccgacacggccaacaagcgcaagttcgtggccgtcgacccgcatgacatcccgatcgtcgccttcgtggacccggatctgaccgattccatgccgcgcggactcaaggtcgctaccggcctcgacgccctgacccacgccatcgagggatacatcaccccgggtgcgtggagcctgtccgactgcctgtcgatgcagaccatccgcatgatcgccaagaacctcgccaagagcgccgacggcgacattccggctggcgaacagatggcctacgcctcctatatcaccggcatggcctattccaacgtcggccttggcctggtgcacggcatggcacacccgctgggtggccgcctcggcgtggcacacggcgtggccaacggcattctgttggctccggtcatggaatacaacaaggacttcaccggagagaagtaccgtgacatcgccgatgcgttcggagtcgaagacgcctacaccggcgatctcgacaaggtgtgcgaagaggccgtgcaggccgtgcaccagctcaccgtcgacctgaagaacccgaccaccatctccgaggtcggcgccaccgaggccgatctggacgcgctcgccaacgacgccttccacgacgtgtgcacgccgggcaatccgcgccaggccacgcaggaagacatcctcgccatctacaagagcctgatgtgagcccgatcatggcacgaatcgtgaggatccgacgtcgataatcaatcgtggcgcgtatcccatgaatccacctcggaaaaaattcgggtgtgccttcacgggatacgcgccacgattcctttggacggtcggaatgcatgcattcacgccgggattgtggggccgtagggggatgacggcttactcgtgcttttcgctccactcctcatcggtgggagtgtcatcatatagctcgcggccctcctgctcggccaactccatctgctcgttaatccatgcggcctcggccggattgatatccgccgtgtcaagcaccttctgccacaccggatacagcatatgcatcaccggatagagcgcagtgatgagaatctccggcttatgcttgcgcgaatgctgcggatgcgcattgaacgtgttcttgaaccggcgcatatagttcaggaacgacgtaggggaggtgtccatgcggcgcgcgctgatgccggcaatcatgcgcgggcaatacaccgtcttcatatccttgccaagcagatgcaacgaaatatcgatatcctcatgcatcacatcggacttgtcacggcacacctcaccggcaatcgcatgccatgcggacgcacgcaacgccatattcgaaccaaacagcaacggctgaccatcatcggccttgtaaatgcgcttacgggtggaattgtcactgcgaagcccgaaatgacgactcggcatatcgtagtacatcaccggaccggtggcgcccatggcctccggatcctcggtgaagatgccggcgaccacctcgacccaatccgggcggatcatgcaatcggcatcgaaacggcccagcacatcacccgtagcatggttcaggccataatcacgcgtgggaatcagcccctgctcctcatcctgatgcaacagacgcaccggagcctcgggatgatccttcatgaactgctcgaccacggcgacggtcgaatcggtggagcggttatcgacgacaatcacctcatgcggcatcacggtctgcctagtggcgttgagcaggcaatcgttgatacgctccgcctcattccatgcagggatgataattgaaacgttcagcatgcctacaagaatatgtgccagtccgtacacggtgcctgtcgctacaataaggagccatgagcgaacgcgtacggcacatgaatgaaacgacggacgatacgatggctgccgaagacaccacgaatacggcgacaaccatggcggatgacgggcaacgctgggatctgggcaccctgttcccggcgaagggcgattccagaagaccaccggaatggctaggacgcgccctgctgtacatcgccatcgccatcgtagtgttcagcttctgctggcgctcctgggggcagatcgcgtatctggtcatggacatcgtggtatccctgttccttgcgctcgcagtggaaccggtggtggtgccgctggtcaagcatggctggaaacgcgccttcgcgtcgctgttcgcgctggtgctgctggcggtgatcctatgtacgctgttcggtctgttcggcaacatgttcgtgcagcaggtgatcgccatgatcaacggcctgcccgacctgtacaagcagatctgcgacttcgtaagtcagtacacgaatttcgaactgccggagatcaacagcctcggcagcgaaatcctcaagaacatacagacctcctgggtcaccgatttcgccggcacggccctgagcacggtatccggcctgttctccttcctgctgaacctcatgaccatcgtgatgaccacgtactacatctccgcagcaggcccgaaactgcgtcgcgccgcctgccagtggatggcgccggccgcacagcgccgcttcctgttcgtctggaccgtcagccaggggcagatctcatccttcctgttttcccgcgcgattctcgcattgctcaacgccaccttcaccgccatctgccttgaggtcctgcatgtgccgtattggctgccgttggcgctgttctgcggcgtcacctcgcagtttatcccgatgctcggcacctatatcggcggtgcgctgccggtgctgttcgcatggggcaaccgtggcatctggtacggcatcgccgtactcgcattcatctgcgtctaccagcagatcgaaaacctgatcttcgcgccgaagatctcgcaacgtaccatgaacatcaacgatgccgtcgccttcctcgccgtgctcgccttcggttcgctgttcggcgcgctcggtgcattcctggcgctgccggtcaccgcttccatccagaccatcttccgcacctacaccaaacggtacgatctggtcgattccccgctgatgaacgatccggttccggaaaagaagtcgaaggtggtggaaggcgccgaggcgatcagcgagcgtgtgctgcatcacataccgcgtgccgtgcagggttccaccgcacatgtgccgatttcagacgaggtgcgtcagctgcaggagcaggcgtacaatatcagcccgtcagatggttcggatgaggctgacgattcacagacggtcgccatcccgaagaacgcgctttccgcccaaggcggcaggccgttgaagggaacggccgacgcggacgacgcatccgacgacaatccgagaagtaggtggcgctaaatggtactgctgagcgtactggacataatcctgatcgtcgtcggcggcgcgggcatggtctatcaggcggtgtgcattctcatctccctgttcaccaagccggtcaggttccccgaagctccgatggacaagcggtatgccgtgctgatctccgcacgcaatgaggagaacgtcatcggcaatctcatcacctgcatccagacgcagacctatccgaaggagctcatcgatatttggctggtggccgacaactgcaccgatgccaccgccgaagtggcgcgcggcatgggctgccatgtgatcgaacggttcgaccagcggctcatcggcaaagggtacgcgctgacctacctgctcgaccggatgaacgaatccggtgcttccgacccgtatgacgccttcttcgtattcgatgccgacaacaagcttgaccggaactacttcgaagagatgaacaaggcgttccagtccggcttcaagatcctgaccagctaccgtaattccgtgaacctgtccgacaattgggtgtcttcgggttccgcattgtggttcatccgtgaatcacgattcctgagcgcctcgcgcatgtggctcggcaacagctgccacgtcggcggcaccggcttcatgttctcgcaggagatcatgcgccgcaataacgggtggaagttccatctgctgaccgaagaccttgaattcaccatggactccgtgttgcacggcgatcgcatcggctattgcggcaccgcgatcctgtacgacgagcagcccgtcaccttctcgcaaagctggcgtcagcgcctgcggtggagcaagggattcctgcaggtgttccgctactatggcccggccctgatcaagcgggcgattcgcgaacgtgatttttccgccgttgatttcacgctgctgctgtgcccgttcaccgtgctcggcatagcccgtattctgctcggcctgctgttcgcgctatgcggattcgtgacctggcagagtcagctcaactcgcttaccggatggacttccggcattgtgatgtcggtggtcggcatgatgggattggcggcgttgaccatcatcgtggaacgcgatcatgtgggagccaccaacaaggaactgttcgcctatgtgctgagcttcccgatctacatgttcagctatgtgccgatctcgttccaggcggtgttctccaaggccgagtggaagccgatcgagcacaagggctgaagtccatctgccgaaggggcgccttcgccatgcgttgcgctttctgttatgcgctggatgacaacgtttcgctgatggcatgatgtacgccgtgcgttcaccgtgggcataatgcgcacgccgttatgaggctgatagggtggtggcatgagtttagacaatgtttccccttctgtgggatttgccccggccgttcccctggatggctccgcagcggtttcgattcgcggtctgttcaagcgttttgggcagaaggtggccgtcaacggattgtccctcgacattccggtgggttccttttacggattggtcggaccgaacggcgccggcaagacgaccacgctcaacatggtgaccggcttgctcgtgccggatggcggtgcggccatgattctcgggcgtgacgtatggcgcgatctgaacgcagtgaagcgttccatcggcgtgatgccgcaaccggaccagatcttcgacaggctgacgggcctgcagctgctcgtctatgcgggcatgctgcgcggcatgaaacgcgacgaatcggtcaaacgtgccaacgatctgctgggggcgttcgacctgacgggtgccgcgaacgtgatggtcgccgactattcggccggtatgaccaagaagatctgcctggccagcgccatgatccatagtccgcgcgtcctggtgctcgacgagccgttcgaatcggtcgatccggtctccagcgcgaatctcagggacattctcatcgaatacgcctccaccggcggaaccgtcatcatctcatcgcacgtcatggcgcttgtcgagaagatgtgcacgcatgtggccgtcatcaacaagggtcaggtctgcgcggccggcaccgtggagcaggtcgcggccggcgaagatctcgaggaccgtttcctgcagctggtcggcggccgtcatgcggcggcgcgactgtcgtggctggacggtggtgcgcagtgaacgccgtcggtaccatcatgagattgcgctgggcgctgatgcgggcgaccatgcgcaaatcgaccatgatgctcgtcagctacatcatcagcgcgatattcggcgccggcgcaatcgtcggttccgtggcgttgggtcttatgctcggtccgctcatcggcggcaccgacggcatgatctggcagatcctacgcatggtgatggtgctgtgcggcgccttcacgacagccatcgtgatcatcgtgcagatcatgtatttcggtcagggcacggccatgaatccgcagaaattcgaactgtacggcatcgatgaccacaccttggtcagcggcctgttcctctccggtctgaccggtctggctacgatctggggcgtactcgtcatgctcggcctggtgccgatctaccagtccgcgggtgccatcggcatcgtggcgggcatcgtcgccgtcccattggcgatcatcaccatgatggtgctgtcgaaactcgtgatctcgctgctgaccacgttgacgaattccagcagcggcaaaagcacgatttccatcatcaccatcctgctgttcgtgctgctgtgccaggttccgggcatggcgatgaacagccaggatctggatcatttcagcctcaagccgttcatgatggttgcggacgtgttctcgtggacgccgttgggtgcggcgttccagctgccgttcgacgtggtcgccggttcctggggctttgcggcgcttcgcctgctgatactcgtcgccacatgggtggtgtgctacctcggttgcctgtggtgcctgaagaaggaccgcaccatcgccggctccaccgcgcacgccgtttcctcgaagggcatcggcctgttctccatgatgccggattccccgtccggcgcgatttcggcccgtttgctcacctacctgcgcagggatccgcgacaggcgccgatgatgttcatgccgttgctgttcatcgtggtgttcaccatacaatcgcacggcataaccgcgatggtatggcagtcgatcatctgggcgggtctcttcttggtgctgcttgaaggtaacggcctgtcctatgacggccggggcttcaccatggaggtgatcagcggcgttcgcggtgtggatgaccgccacggccgcgtgcgggtctatatggtcatgctgatcgcctacatcgcgatactgatggtcatcgtctatgcgatcaccggcgactggcgcagtaccgaagggctgatcatgggactggtcttcggctgcataagcctgtgtctgggattctgcggcctgggcttggcggaagtggtctcctgcgtgttcatgtacccggtaccgtccatatcgcgcccgttctcgtcgccgcagggcagggtgggagcccagatgctgttccccttcctgcacatgttcggcatgattctgctgttgctgcccaccggcatcgttgcgttggcgctgggattgacgggcaattgggagctgtattggctgttggcccctgtttcgctggtcaacggcatcgccgcgcttgcgattggtacatggcttggcggtaagctgttggaagctcggatgccgagaatcctcgccactttggactccttcgcatccctgcaacagtaaggacggatctttgtcggattgagggggagcggtcggtgacgcgcagagcaggagcattccagcagaggacgattcgccgccgcgtcaccgtattgctttccgtggccgtcaccgcggcattgtgcctggggtatgtggcaggcgacctgtatgacgtgttgccgggcgtcctgacgctcaacgaggtggaacgtgtcacaaccgcggagccccgtaccgtaatgtccgcttcgaaggtcgtcgggaatctggattcgtcgatcgccgtggatgccaccgccgcacggcggcttatcgacgaattcgccgcgaccgagggcatcggcggcgactattccatcgccatcgccgacgccaagggcgaggtggtggccgaaagcggcatcgacgagacacgggtgccggcttccaccatgaaaacgttgaccgcatacgccgttgcgaccacactcgacatgggcagcaccctcgccacgcagacctatgtggaacagaaacaggacggtaccgcgaatctggtactcgtcggcggcggtgacatgctgcttggcgcgggaaacagcgattccgcgcacgtcaatgggcgggcggggctcggcacgctggccagcgacaccgcgcgggcgctgaagcagcgtggcatcagcgaggtgaccctgcgctatgacgattcgttgttcggcgatgatcgttggccgtccggcatcgccgaacttgacaccgaacacctgtattatgcgccggtctcatccatggccgtggacggcgcgcggcaatgggacggcgcgaatccgcagaatcccgatgtgttctccacctatcccgccttgagcatgcagccggcgttggatgccgtgcagacgttccggcaacgtttggaggagcagggcatcaccgtgcagggtgatgtcgaacagggcgtcgcaccggcggaaaccagcccgatcgcacaggtgcaatcagcctctctgagcgagatcatggcattcatgctgcggcattccgacaacaccctggccgaggaattcggccgtctgctggccatcgatagaaaaacgggcaattcgccggtaggcgcggcccgagcggtcaagagcgttctggaacaggcgggaatctccacgaacggattgcgtatgatgaactgctccggccttgcggaggaatccaaggtcaccgtgcgcacgttgcttgaagtgcaacagcgtaatctcaccgccgggaccggtgccgcggctgcggaaggattgtccatcgtaggattcgtcggcaccgcggccgaccggctgaacgacgcctccgaagcgggtctgctgcgtgtgaagaccggcagtctcgacggtgtcaccgccatgaccggcaacgtgtcacgcacccgcgggggagcgctgaccttcgccgtcatcgtcaacgatcccgacgatatgcaggccgcgcgcgacgccatcgacacgttcatcgccggtttgccgaaactgtgatgccccatggtgtactccccacgactgcgtaaggccatagggcatcttaacgccgcgctggccgacgccggattcggactgcaggacgcgcggttcgcgcggcacggcgagcatgaaccgaatgcggacgcgccattgatcatggtcgcatgttccggcggacgggattccatggcgctggcggcggtctgcgcaaccgtatgcgccagtctgggattgcgctgcggtgccatcatcatcgaccatcaactgcagaacggttccgccgaggtagccgcaaagaccgcccgtcgttgtgaggcgctgggccttgatccggtacgtgtgcgtgccatcgaagtgcacggcaacgggcaaggccttgaagccgcagccagggaagcccgatatgccgccatcgtcgaggaatgctccgatgctgcggccgtgctgttggcgcatacgaagaacgatcaggccgaaaccgtgctcatcggactgctgcgttcggccgggcttgacgccatcgccggcatggaaggctcgttcagtcgtgacggtgtgacgttcctgcgcccttggctggatgtgacaagggaggagaccaccggcatctgcgaggatctggggctcgaatggtgggacgatccgaccaacggtcccgacgcgatccgggaagacggtttgccgccgaacggcccattgccggcgaactatccgttacgctcacgcgtacggcacgatctgatgccgtatctgcaacgtttcgcagggggcgatgtcgtttcgcggctttcaatcggcgcgggacttgcgcagaccgacagggattatctcaacaagcgggcgcaggagatcgccgaacgggcggtgacattcagcgaagaccaggtgcggttcagcgtcggcgtactgcaatcgcagcatgaggcgattcgactgcgcgtcatcgcccacgcactcggccaggccggcatcgcatgctccgcacggcatgtcaggcagatcgaccggcttatcaccgactggcatggccagcacggtgtggcacttcccagcggatattcagccaatcgccagaaacacgtcattcgcgtgtgccaagatggtgggcatgcgaatcgctgacgtgcaagaagacattgatcatgaactgatcaccaaggaacagattgaagatatcatcaaccgtgctgcggcccaagccagtgaagactatcgtggcagaaatccgttgctggtatgcgtgctcaaaggcgcggtgaatacgatcgccgccttcgcgcaggccatgagcattccggtgcagatggatttcatgagcctgtcaagctacggttcaggcaccgaatcaagcggtacgatcaccgttcgtcaggatctgtcgaccgacgtgcgtggccggcatgtgctgatcgtcgaggacatcatcgattccggcatcacgctgtcgtggctcgtcgacgcggtggtgcgccggggcgccgcttccgtggaaatctttgcgctgctggaaaagcccgcccgccgaaaggtggatgtggatgtgaaatataagggatatgagattcccgatgaattcgtggtcggcttcggtctggattatgacgagcgctaccgcaatctcgattcgattgcggtgctgaagccggcagtctaccaaggaggtcaggcatgagttttccttcaggccagccaccgcagaacaacggcggcaattcgaatcgtccgaacaacggtaatccgtttaccaatccgttcggccacggcaacaacgatggcggcaatggtccccgtccgttctggcagtccccgtggctgtgggtggtggtcgtggcgctgctcgccgtgacgatgttccagctgttcgccggcaccggatcgcaaaccatcgacaccaaggacggtatgcagatcctcaacggcggcaacgtcgaatatgcgcagatcgtcgacaatacgcagcaggtcaagctcaaactgaagtccgactattcggccaccgatccgacgaccggcaaggtcaagaactacggcaagaacgtgcagttctactacacgtacgcccagagcgccgccgtggtcaaggccgtgcagaaggccgacccgacccaggggtggacggcgaccatgcagcagaccagcgtctggacgtatctgatcacttcgattctgccgttcatcatcgtcttcgcgctgttctggttcctgatgagccgcatgggcggtgccggcggcatgttcggcatgggcggcaagaagaacagcggcaagctgctcgaaggtcagaccccgaccaccaagttctccgacgtggcaggcgaggatgccgccgtgcaggaagtcgaggagatcaaggacttcctcaaggatccgtcccgttacaaggccttgggtgcccgcattccacgtggcgtgctgctgtacggccctccgggcaccggtaagacgttgctggcgcgagccatcgcaggcgaggccggcgtaccgttctactccatggcgggctccgacttcgtggagatgttcgtcggtctcggcgcatcccgcgtgcgtgacctgttcgacgaagccaagaagaacgctccggccatcatcttcatcgatgagatcgatgcggtcggccgcaagcgtggcggttccggtatgagcggcggtcacgacgaacgcgagcagaccctgaatcagctgcttgtcgaaatggacggcttcaacaacgacaccaacctgatcatcatcgccgcgaccaaccgtcccgacgtgcttgatccggcattgttgcgcccgggtcgtttcgaccgccaggtggccgtggaagcgcctgatctggaaggccgtgaggccattctgaaggtgcacgccaagggcaagccgttcgtgccggacgtcgatctgcacatgatcgccgtgcgtacgccgggcttcaccggcgccgatctggccaacgtgctcaacgaggccgcattgctgtgcgcccgtgccggtgcccagctgatcgacaaccgtgccatcgacgaggccatcgaccgtgtccaggccggcccgaagcgccgttccaagggcatggctctcgaggaattgcgcaacaccgcctaccatgagggtggtcacgccttggttgccgccgccatgaacgacaccgatccggtcaccaaggtcaccattctgccgcgtggccgtgcgctcggctacaccgccgtgatgccgaccgaggaccgctactccatgtcgcgtaaccagctgctcgaccagatggcctacgccatgggtggccgcaccgccgaagaggtcgtgttccacgatccgaccaccggcgcctccaacgacatcgagaaggcgacgaacatcgcccgccagatggtgctcgactacggcttctcatccaagctgggtgccatcaagtggtccgacgacgaacagggcgatctgggatccctcaatcacaagtattccggccgcaccgccgaaatcatcgacgaggaggtgctgaagctcgtcgaaacggcgcataccgaagcgtggaacgtcatcaacgagaaccgtgacatcctcgacgagctggtacgtcagctgctcgtcaaggagacgctcaacgaaaaggaactggccgcgatcttcgccaacatcaagaaggcgccgaagcgtgacgtatggctgagcgacaaccagcggcccgattcggacaaacctccggtcgagattcccgaatccctgaagaaaagcgcaggattgaccaactgatgagtgataccgaagcattcgataccatgtttgacgacaaggcccgcgccgctcatgcggccgggcctgtcggctatgacgaggaaggcgtacgccaggcggtacgcctgttcttgcgatccatcggcgaagacccggatcgcgaaggcctgctcgacacccccgatcgcatcggccgtgcatgcagggaattgttcgccggtctggggcacggtcccgaagaggtactgaaaaccaagttcaaggtcgacaccgacgaaatggtgttggtgcgtgacatcgagctgttctccgtatgcgagcatcatctgctgccgttccacggcgtagcccatgtcggctacattccgtcgaatgggcaggtggcgggcctcagcaagctggcccgactggtggagttgtacgcccggcgtccgcaggtgcaggaacgcctcacccagcaggtcgccgatgcgctgatgatcggcatcgaggctcgcggcgtgatcgtggtcaccgaatgcgatcacatgtgcatggccatgcgaggcgtcaagaagccacagtcgcgtaccgtgacctccgccgtgcgaggctgcatgcgagatgccgccacaagatccgaggcgatgagcctgattctgtcacagcattcgtgagatgccgcacaggccatataacggaaggggaaacatggtggcacaggatatgaaggcgattcacgatagcgaacgcaccctggtgatgggcgtgctcaacatcaccgaagactcgttctcagacggtggattgtggctcgatccggcaaaggccaaggcacacggcgaggcgatgatgaaggatggggccgacatcatcgacatcggagccgaatccacccggcccggcgccaagcgcgtcagcgaggaagacgagaagtcccgcgtgctgggagccgtggatgcgttggttcccgaaggtgccatactgtccatcgacaccacacgcgcctcggtggcgtcggtggcactggagcatggcgcgcagatcatcaacgacgtgtcgggcggacggttggatgccgaactgccccacgtggtggccgaccaccccgaaagcctgtacatcgtacagcattggcgcggttggctggccggagcggccggcaatgtgcctgacgccaacacctccgtgtacgcgaacggggtgctgaacgacgtgtatgacgaactgatggcgcaggtcgacgcagtgctgagcgtcggcgtcaaaccggaacaggtcatcattgatccgggcctgggcttttccaaaccgggcatcgaacataatctgccgttgctggccggactggaacggttcaatgccacgggccatccggtgctggtcggtgcttcgcgcaagcgtttcatcggtgcggtactggccgcggcgggcgtcagcgaaccgaccatggccgacagggacaacgccaccgccgccatcagcgctttgagcgccgaacatggtgcctgggcggtgcgtgtgcatgacgtggcccgtacccgcgacgccatagccatcggcagcgcttggcgcgcatacagtaagtagttcttcctccctctgatgaggcaatgacggacggaaaggttggcatggatcagattcgactgacgggaattcgcgcggcgggtaagcatggcgtgcttgattttgagcatgaacgtgcgcagaccttcgtagtggacgccacgctgtcgctcgacttggcgcccgcaggccgttccgacgcccttgacgacaccgtggattacggtgccatagccaaaggcatcgtggccatcatcgaaggcgagcatgccgatctgatcgaaagactcgccgctcgcatcgccgacatgattctgcaatatcccgcggtgcaacgtgcggaagtgaccgtgcacaagccgaacgcaccgatcgtcgtgccgttcgacgatgtcagcgtcaccgtggaacgcttccgtgaaacgggccgggccgaatccgccgacacgcatcatgccatcatcgccatgggaggcaatcagggtgatgtgctctccacgctacgcgatgcggtgcgttgcatcgacggactcgactccacgcaggtcaccggcatttcgccgctatatcgcaccgacgcatggggcatgccagcgggaacacccgacttccgcaatgcggtcgtttccgtcaacaccaagctgaccgcacccgaactgttggccggattgcaacgcatcgaagcctctcatggccgcgtgcgcaccgaccattggacttcgcgtacgctcgaccttgacatcatcgacttcgacggcatcgtcagcgatgatccggatctgacattgccgcatccacgtgcgtggcagcgtgccttcgtgctcggcccctggctggcattggattccgacgccgaactggtcggcgcgcatgccggatccgtggcacaactgctgttcgaatcctccgatcgggagcacatcaacgagctcgccgaagactggatggtcgccgatgacgccgctgcgtctcccgttaccggttcctgccacgaggagccggcctctttacaaaccggaagcggtcaacatcggatcgaatccctagcacgatcccgtcgagccgtaatctccatggacagcccttccaccgatgcggaacggcggttccgcaaggcgatcgtgtcgatcgacggcatccccggcaatcaggtggaaggcatttcgccgttgtaccatgtcagccaacttgacggcaaacccgacaacatggccgccgtcatgcagatttccacacgcatgggtgcagccgaactgatcacagtgctcggatccatcgaaacatcggtcggcggtagcctcgatctcgatctggtcgatatggaaggcgtcgtcagcgacgaaccgaattgccaggtgccgtggcccaccgcccgcaaccatgcggccgtactcgcgccgtggctcgacatggatccggacgccaggcttggcggagatccggtgtcgttcctgctggccatggctccggatacgtcgcaggtcggtctgctcaccgacaactggattattggagatacgctatgaaggcacgtcgcaccccttggtggcattacgttctggccgcgatgctcggcctgcttgccggacttggttttgcgaaatacggtgagatcaccggactgccgctggtcggtgcgccatgggtggtgccggtggtgctgatcgcattgggcctcatggtgctggttcttgcgttgcaggtgcacaaatacaccacgaaggatccgctcaaacgtgcgcagctgaagccgctcgatccgcagaaagcattcggcacgctggtgtcatgcaaggccatgggattggcgggagccgcattgaccggttggtatggcgggcagattctggcgagcctgcctcatatggaagcggagttctacagccaggccgtcatcgaatgcacggtggcggcggtggcctgcctgatcgacatgatcatcggcatcgtaggcgaatggctgtgccagctgccgcctatcgacggccccgaaaatcccaagatcaaggaagccgcccaacgtcaacgctatgcggcggcggccaccaaatcctcccacgtccaatcatcctgctgaaaggcggaaccgctttccgtgatttcccgaagcggtctaccgcagatcctcttgcggcacgcgaatcatggcctcttgcgccatgcacgccaccagcgtgccgtcctgcgtatacaccttcgcttggcccaagcctcgtccgtgcgctgcggtcggcgtatcctgcacgtacagatgccactggttgatgtcgatgtcgcggtaccaccacatcgaatgatcaatcgacgcgaacgagatgcccggagtggcgatgctcagaccggcacgacgcagcaccggctccagcatgacctgatcgcaacccatggccagcatcgcacgatgcatgacttgtggcacatccacctcgccatccgccctcatccaaaccatctgcttgccggaatccctgcgggcactcttcgtatcggcccccagcatgatggtctgcgtaacgtgccggatgtcgaacggcgacttctgcgcataatacttggcatacgacgactgctccgcgtacggttccatgatttccttcgcgcttgtcagcgtctccggatccggcacatcctcgggcatcggatcggcgaactcgacaccctcctgaccatgctcctggaagctggcgatggcggtcagaatcgaaccctgcgcctgcgtgacattcactcgacgggccgagaaggaacgaccgtcgcgaaggttttccacgtcgaacaacagatcctgatgaatatcgccggccgatatgaaatagccatgaatcgaattgggcaatcgtgacggatccaccgttttcgatgcggcgatcagcgactgcgcgatcacctgaccgccatagacgcgtccggtggggaagtacaggctttcgccgttcacatacgtatgatcgcggtaagtggaaggcgtacccagcttgagcactttcgtcagtcgctgcaacggtgtgacttctggctgtggcatgaagggcctcgattcttgttctgttatggtgctacaagtgccgtaatgccttcgagtctatagagaagcagtaaatttcatcggattgttttgtaacgactgcgtgagaagagtgaacggcaggtaatcggcaaacgattgaacaacgacaaaggcaccacccccgtaacgagggatggtgccttgtcgaaatccgcgcgtaacgccgaagctatgccggcggtgcgattagcgggtcagcttgcggtgcaggcggtgcgggcgggccgcgtcctcgccgaggcgggccacacggttctcctgataggcctggaagttgccttcgaaccagtaccatttggccgggttctcgtcatcgccctcccatgcgaggatatgcgtggcgactcggtcaaggaaccaacggtcgtgggagatcaccacggcgcaacccgggaatgcgagcaacgcgttttcgagcgactccaaggtttcgacgtcgaggtcattggtcggttcgtcgagcagcagcaggttgccgccctgcttcagggtcagggccaggttcagacgattgcgttcgccgccggacagcacgccggtgagcttctgctgatcggagcccttgaagccgaatgaggccacgtaggcgcgggtcggcacttccacgccggccacctcgatgaagtcaaggccgtcggacacggcttcccacaggttcttgttcgggtcaaggccggcacggttctggtcgacatagctgatctgcacggtgtcgccgaccttgagcgagccggaagtcaacggctcgaggcccacgatggtcttgaacagggtggacttgcccacaccgttcgggccgatcacgccgacgatgccgttacgcggcagggtgaagctcagatcgtcgatgagtacgcggtcgccgaacgccttatggatatgctcggcttccaacacggtggagcccagacgcgggccggccggaatctggatttcggagaagtcgagcttcttgttgctacgtgcctcctgctccatttggtcatagcgttccagacgggccttgttcttggcctgacgggccttcggcgaggagcgcacccagtcgagttcgttcttcaggcgcttggcgagcttggcgtccttggcgccctgaatctccatacgcttggccttggtctccaagtaagtggtgtagttgcccttatacgggtacaggtgaccgcgatcgacttcgcagatccattcggccacgttgtccatgaagtaacggtcgtgggtgacggcgatgacggcacccttgtactggtgcaggaactgctccagccacaggatcgactcggcatcgaggtggttggtgggctcgtcgagcagcagcaggtccggagcttcgagcaacagcttgcacagtgccacacggcggcgttcgccaccggagcatacggtcaccggagtgtccgggtccgggcactgcagggcgtccatggcctgctcgagctgggagtcgagatcccagccgttggcggcgtcgatgtcgttctgcagcttgcccatctcttccatcagggagtcgaagtcggcatcaggattggccatttcctcaccgatctggttgaaacgggccaccttttcggcgatttcgccgaacgccatcttgatgttctcgccgacggtcttggtctcgtccagcggcggctcctgctgcaggatgccgacggtgaatcccggggtcagataggcttcgccgttggagacggtgtcgatgccggccatgatcttgagcagcgtggacttgcccatgccgttcgggccgacgacgccgatcttggcgcccggcaggaagctcagggtcacgtcatcgagaatcacgcggtcgccgtaagccttgcgggccttgatcatctgataaatgaattcagccaatgttgtgttccatccttaagaaacgttggaattccagcgtgttgcatgagcaagtcaacggaaatctcacgtttggaggccggaccgtgcatcacgcaaagtaccgtccttgattatcccataccccgtctacacgcaggaaccaatgtgttggattggtggccggagcttcggtcaggcggtcagcgggccgaacaggtgctcatgcagcgcaggacgcatcacattgtcgaaatcaccggattccgggcattgcacggcaacgaccagtccctgcttcggcagcacggtggtgatctggccgtacgcaccgtccgcacgatacgcgccatcgtacggtgacatccagaactgatagccatagccgcatgtccagatattgtcgtgcggcgtttcgatctgctggcttgatgcggcgctcacccacgattcacctacgacgcgcgtgccgtgccatgcgccgccgttcagatagacctgtccgagtttgagcatgtcggccagcgtcatgaacatgcccgcgccggcgatgggatgcccttgcggatcgcactcccagatcggccacccctgttcgagccgcgagaagatcgtgcgatgcaggtactcgccaaggtgttcgccacaggcccgctcaagcatgcggcccgccaggtacgaatcggcggatgaatagcagaacgcaccgcccggctccacctcgattcgacgggagaacatgtatttcagataatccggtgctcccacgccgccacgacggtcgggactcatgagatacgcatggttgaagccactcgacatggtcagcaggtggcgcagcgtgatgcgccccaactccggctgcgcgtcggccggtacgtattcggggaacgcgtcgaccaatttgccatcgagactcagtattccttcttcgaccgcgatgccgatggccgtcgacacataactcttcgtatgcgaatagatgttacggctctgatcgggcgtgaaatgcctctcggcgacgatccgctcaccgtcagccagcgccaccgcctcaatcggcagatcatcgctgtcgacgagattcacgaaatcgttgaagatggtgacggcgtccataagaatctcctttgatgccacaggggaagcacaggaatgattatagtgacgtcaaacgattttcagcgaggatatcgtgttgtctgggcgggtcgccgatggtcgagaccatgcgtggacgtcgtcgtcaaacgtgcaggccggacgcttgacggtcgtcggtgcgatcttgcccggtgcgggcatgcgcttcagatgataattccggcgcagtgatcgacctcatgctgaatgatctgcgcggtgaaaccggtgaacgcggcatggcgttcgcggaatttgcggtcgaaatacgtcacctcgatgcgttggtggcgcacggtgtggcgttctccttgaagggaaaggcatccttcggaggtgtcgaacgcgccgtccctcgcggtgatttcgggattgaacatgatgaagatgcggccgccgaaatcctcatccacgaaggcgatgatgcgcttggagacgccgatcatgttcgcggccataccgacgcaactattgcggtgcgcgtcaagggtgtccttgaggtcctgagccacggcaaagtcctcgtccgtgttctgcgcgtcccgggacggttgttccaaaaacgggatggatgtcatgatctctcgctgcatgccctattccttccttccgcgtgacggatttcctcattgtacgtacggtgtagttccctatatcgcttatagatggcgggtccacgttgcgtttagggttaaaaacacagaaaacgtaccccctaaccatagggtctcgtggattatccgccatctataagcgagatgctgtcaacgctggtaggtccagcgcccgcttagcatggtaccgactatgtgttcgggcatggcctgcatggattccggttcatcgatgatgcttgggtcgcggtcgagcagcaccagatcggcgttgtctccgacccgcagatccgtgcgcccctgtgcggtggacgatgcgagggcgtgttcgaagtcaaggcactgttccggctggaacggttcccggtcggagctttccgtaccgaacacggcggcggaaatagccaaccatgggtcgagaggcgcgaccggcgcgtcggaacccataagaagtttcgttccggcttcgtgcaatgcgttgaatgcgtaaggaaccccggccggattgccccagaatcgagtgatgacgtcgcggtcatccatggcatgctgcggctggatgctcgcggcgagaccaagttgcgccaacctcgggatatcgctttgcttaagcatctgggcgtgctcgatggaaccatgggcatgagtacgctccgcgcagtcgagtacgatggtgttcgccttatccccgatggcatggcaggcgatgtcgaagccatgctcggtggccaatcgcatgtaggattcgatctgttccggcgtataactcaaggttccgaatgtttccggagtgacgcctgagtatggtgtggaacagtaggcggaacgagtgttcaaggatccgtccgagatcatcttcatcgcgccgacgtgcccaaggccatggcttccgggaagttcgtccccggtgtgccatccgtcatcgatggcctgccggaggcgctccggatacacgccggcctgaactcgaaggccatcaaggccctgcgcgaatcggtcgatccaagtgccgatgttttcggccatttcgtagtcgcggataccgaccacacctttgcgtgcggcgtcgagctcggcgttgcgtaggaatcccatcagttcactggcggcgttcggccccttgtcaagcttgcagtaggcgtcgaaccattccagctccccgaccaatccagattcgtcgacgtgcacgccaagcttttcggcggcggcggagttcacccagccgcagtgcatgtcggcgctggacagggcgaccggctgatttcccgtgacggcgtcgatggaagccagcgtcggctgcgcgtcatcggcccacagggagtgtctgaaccgcatgccgaccacgtattggtccggattgagcgtgcccttcgcgcgccgtgcgtccaaatgttcgcggagcatgtcaagggcctcttcggcgctgcgggcctcaatcagatccaatcgtcccagggtgtacgaccactgggtgaagtgcgtgtggcggtcccatagtccgggaatgacccatgtgtttgagaaatcatcggatgggttgaccttggcgatccgaccatcttcgatttcgagatcgactgacgtgtccgtgcctacgaatcgtaggcctttcagacttgtcttcttgctcatgcgtcctcttttccgttgagtgggcccgttgtgcccacgataccgttcaacgattccgtgcgccgttcgttatccacttatccacaagtttttaggggtctgtagacagtgcattgtcggctcctttaccttttgtgtatgggcaatggggcacagtattcggaggaacttgcgatggcaagggcccgaaccgtcgaacgatgcctggcggcgcagcgaaggaccggcaggcagttggtcttcgccttgggcaccgcattggatttgcagggtatcgagcggcccagatatccacatggcagtggtcttgccgatgggctgtatgcggtgatcggaagtaatggttctcgtacggtgttgcgggatgtgcgtctggtgctctggcccgggccgcagaatcatgtctcggcttatcctggccgcttgcgctgtaccgaccccgtgacgacttgggcgatgcatgccaatcggctggaagacgaggaactggtcgtgttgggggattcaatgatgcggcgcaatgggcgtttgaaaagggccgggcttgaggatttccagttgtatgtcgaccggcttgatgatcttgagcggtatgctgacctgaaaagaacccgggccatacgggggatcacaaagatgagaagggccatccgcctgatgagggaggatacggattcctctcaggagacgagaacgagaatcgctctgatgcgctacggacttccctgcccggaagtgaaccaccccatcagaatcggaaggtcttcgcagatgttccttgctgacatggcttatcccgatttgaaggtcatcgttgaatacgatggtcgtcatcatgcctcccaatggttggcggatatcaaaaggcgcgaggcattggaggatgaagggtggctgtatgttcaggtgaccgccgagaatctcgcggatgagtcatcccaggagatgttggccgaacgtgtggcccagaggatgtcgcggcattcggccaagccggtgaaattgcgcgatcgaatgatcgtgagggagatcgttgacgggcgtaggaagcacggatgaatggttatcttgcttatagatggcggataccagccggcatagccggcttagggggcatctttcctctgttttatgtttgccggtcggttggtatccgccatccataagcgaaatagcgctaccttgaatccatctactgtatggaggctagggcctgatcgagatcggcgatgatgtcggccgcgttttcgatgccacagctcagacgcaccagatcgatgcccacgccggcttcctcaagctgttcgtcggtaagctgacgatgcgtggtgcccgccggatacagcgtgcagctgcgcgcatcggccacatgcgtggcgatcgacaccatcttcaggtggtcgaggaatgcggagaccttctcgcgtccgcccggcacgccgaaggaaatcacaccgcaagtgccgttcggcatgtacttctcggccagcgcatggtacttgtcaccttcgagccccgggtagctcacccagctgatgcgcgaatcggcatccagccaccgggccacggccagcgcgttcgcgcaatggcgttccatgcgtacgcccaacgattccatgtgcatgcccatgatccacgagctgatcggggccggcgtggagccgaaatcacgcatgagctgtgcggtggccttggtgatgtaggccgccttgccgaactccttcgcgtaggtcacgccatggtaggactcgtccggcgtggtcaggccggggaacttctccgcatgcgccatccaatcgaagttgccggaatccacgatcgcgccacccacgcaggagccatggccgtccatgtatttggtggtggcgtgggtcacgatgtccacgccgtattcgaacggtcggcagttgatcggcgtcgggaaggtgttgtcgacgatcagcggcacgccatggcggtgcgcggcgctcgcaaacttctcgaaatccaatacgataagcgccggattggaaatggattcgccgaacacggccttggtgttcggccggaacgcctcctcgagttcctcctcggtgcattcgggactcacgaacgtgcattcgatgcccatcttgcgcatggtcacgttgatgagattgaaggttcctccgtagattgcggaggaggctacgatgtggtcgccgttgttgcagatgttgaacaaggcgaagaagttcgccgcttggccggatgaggtcagcatcgcggcggcgccgccttccatctcgcagattttcgcggcgatggtgtcgttggtcggattctgcaggcgagtatagaagtatccggcttcggataggtcgaacagccggctcatctgttcgctggattggtatttgaaggtcgtcgcctgaatgatcggtggcgtgcgggattcgccgttgcctggctggtagcctccctgcacgcaggtggtgtcgacgttttcgtacatggtatcaactccttcgcgcatcttcgcggcatgtgtgatgctgcaacaaacatggctactttagcattgcgcgggcattcggctgttttccaacggaaacgccgaatagttcagcgaattgacaaacttaggtagatgaatttattatgtacatcaagacgggcggaagtccgccgggaagaatgctttaccaaagtaaaaaccaacagcaaaggagcaccccatgggtctgtgggatatcgataagattccgtatgtcggtcgcgaaaagggaccgcaggaaggtctggctttccactactacgacgccgataaggtcgtcgccggcaagaagatgaaggattggctgcgcttcggcgtcgcttggtggcacaccttcgatcaggagctcgtcgatccgttcggcactggcacctcccagcgcccgtggtacggcaagtactccaatgccatggatcagtctctggccaaggtcgattacgccttcgagttcttccagaagctcggcgtcgaatacttctgcttccatgatcgcgacatcgctccggaaggcgacaccctgcgcgagaccgacgccaacctcgacaagatcgtcgacaagatcgaggagaacatgaagtccaccggcgtcaagctgctgtggaacacctcctccctgttcaccaacccgcgtttcgtctccggcgcctccacctctccgttcgccgacatctacgcatattccggtggccagctgaagcactccctcgagatcgccaagcgtctgggcgccgagaactatgtgttctggggcggccgcgaaggctatgagaacctgtggaacacccagatgaagcgtgagcaggagcacatggccaagttcttccacatgtgccatgagtatgctcaggagatcggcctggatgcccagttcctgatcgaaccgaaggccaaggagccgacgatgcaccagtacgacttcgatgcatccaccgccatcgccttcctgaagacctacgacatcgacttcatgaagctgaatctggaaggcaaccacgccaacctggccggccatacctaccagcacgaaatccgtaccgcccgtgaagccggcgtgctcggctccctcgacgccaaccagggcgacaagctcatcggctgggacatggatgagttcccgaccgacctgtacgagacctccaccgtcatgtgggaagtcctcgccgctggtcagatcggccctcacggtggcctgaacttcgacgccaagccgcgccgtacctccttctacgccgaggatctgttccgctcccacatcgctggtatggattccttcgccgcaggcctcctggttgccgccaagatgcacgaggacaagttcatcgagaacctgcaggccgagcgttacagctcctacgactccggcatcggcgcgaccatcgaagacggcaccgcgaccctggcttccctcgaagagtacgctctggacatcccgcaggccaagctcatcgagtccaccaagtccgatcatcttgagtccgtcaaggccacgatcaacaactacatggtcgaggctctggccgaggcctgagttgaggtccgggttcgtccgaacccatgattcatcactgaatcgcacagtccggcccgactgcaacggggccgtgtaaggcgaaccggggcatcgtgccccggttccctccgatctttctctcctgatactccttccaagaaggtcgcctgcggggcagcatagcccgcaggcgattttccgttgtacgcatcacttcgagatgttcgattctttaccgcgagatccgtccgcaaaggcgcgaaccatgacgattgcagcaacaaccatcaccaatccgattctcagtggcatgtatcccgatccaagttggatctgggatgaccttcgtgggcaggtcgtacttgtcaattcctcattcgaatgtgttcccggtctgccgatccatgtgtccgaagacctttcgcattggagccatgtggccgatgccatcgatgccgatatggcccgacgtctgctgattccgttcgttgaggattcgggtggcgtctatgctccgaccttgcgcagcatcgcgggcaaatatgtgatcgcctccacggtggcccgcatcgacatggataaggcgattgcggcggggtgtgcacggtcggaactggatgatgcgatacggtccgcaggtaatttcatcatcgaagccgatgcgattgagggaccttggcgtggcccgttctggatttccggtgcggagggcattgatccggatgtgttcgaggaccgggacggcaatgtgtattggacgcagaccagacccgccattcatccgcagtgggagggacagaccgaaatctggacccaacgcattgatgcggattcctggtcattactcgaagatggggctccggctggccgagggaagacgattatctggcgtggatacggtatggaggcggtatgggccgaagggccgcatttgtaccgtatcggtgattacgtatatctgctgacggctgagggcggtacgggtttcgaacacagtgagatggccatgcggatgtatgctccgaatggtttggctgaagcgttcgccaagtatgaacgtatggccgtcgaagtgggggagcggataccgtcggtgcgcgaaggcgaacggtgctacttgggcaatgcgattcgcgcgtttcatgccgataggaagaatccgatactcacgcatcgtcattggggcatgtccgaactggtgcaatgcgtcggtcatgcggatttgctgcagcatccgcaattcggttggtggatggtgtgtctgggtgtgcgtgaaattgcgggtgagactccgggtgagctgctgagctacttgggcagggagagcttcgtcactcccgtgcgatgggagcatgattccgctgattggaagtctcgaggggatgagacttcaattttggcggagaatgacccgggttggccggtgaccggtgcgggcatcgggcgtcttcccgactcgattacgatggaattgagcgaggaagggcatgcgcatatggttgcgcatgtcgggcaggccgccgccgaatcgaaggcaatgctgctggatgtccggcagcgcgtttcggatgaggttttcattcgcggcgagacggccgtgcgttaccgaagaatcgcgcaattgccgtgtctgatgccgttgccggagttcggctctctggtgatccgtcaggattccgccaattatgcgacattcacgttggcggatgacgccgtgatgtccttgctgcatgtcggtgacgggcggatcgttcgttctcgagtcgaactgtcgggcgtcccgttatctcgcgttatggtccgttttgcggacagtcgtcttatggtcattgtggcggaagacgtgcggccggttggtgccggcttgtcccatgatgaagattgtgcggatgatggccgggctctggccgaattcgatgcgcggttcctgagtgcggaatgggcgggtggttttgttggctgtatggcgggattgtccgattaggtcgaggcatatgcgcgggatggcgcggctcgaccgttccggcctgactattggttcaactgctgcgtgctattacgcaccaccagcgacgtgggcatgatgacgtgcggttgcagtacgtcatcggtggtcagcgcttcgacgagcatgcgtaccgaggcgcgagccatgtcctgcagaggctgtttgacggtggtcaatgccggaccgaggaaggatgccgtctgcacgtcgtcgaagccgacgaccgacaaatcctccggaatgcgtagtccgagctgtctggcagcttcgtacacgcccatcgcttgcaggtcgctgccggcgaagatggcggtcggcctgtgtgggttttccagtagcgagatggcctgcgcgtaacctcccggggtggtgaagtcgccttcggtgatgagttcagggtcggcggagatgccgtgttccgcaagggcggacgtgtatccgtcgagacgcgctttggagcacatcatttcctccgggccggtgatgatgccgatacgttggtgtccgagggcgagcagatgtcgggtggcgatcacgccaccggtccaattgtccgcctgtacggacaatgtggccggatccgggtctccgaatgggtcgaacagaacgaagggaatgccgcgggaatgcagtttgttccgttcgatgcgggtcaggttggagaaaacgaggatggcgccggcgatttgcctgcgcaacatgttgtcgatccaggtcgagtcgggatgccgacggtcgccgccctccgtggtgatgacgctgaggtcatgcagtttggcttcccgaatggcgccgcgcatgacttccagggcccagacgttatcgaagtcctggaagacgatttcgatgagtttttgttttttgccggttgtcgccttgcgtgaatagccgtattttttgaggacggcgttgatggtctgtctggttgcttcggatacgtccgcacgtccgttgagcgccttggataccgtggcgagggagtagccggtttccttggcgatgtcggccagtctgattgactgtttgccatgttctgttgctttacgaaccatgagtgggtctccttctgccatcattctatacgcttggagagcgaaactttcgaattacggatttcgaaactttcggattatgtggatgtattggattcgttgaaatatcaacgatttttgaagttagtttggtgagtatattaatttgactcgcaatatattattcaattatcctagtgatacaacgaaattaaaacgaaaatttcgaggcaagatgaatcaaaggccgattccatcttcccaagctgatatgcgttgcgaacgtttcatcagctgttcgccaatccatcgttgatatgcgctttcgaagctttcgttctttcgatgccgtcagtatcgatggcgattcataacaaggagaagacaatgaagttcaaaaccgctgccgcggccgcactggccgtggccaccatactgggcatgggagcctgcggctccactgattccagctccggaggaaagaccgaaattgtggtgtgggagaattccaccaccggtgacggcaagaagttctgggaagacgccgctgccgcttatgagaagaagaatcccaacgttcatatcaagatcgaagccattcagaatgaagatatggatggcaagctccagacggccttgcaggatcctgattcggcgccggacgtctttcttgcacgcggcggtcaaaagttgcgtgatgtagttgaggcaggccaggcgatggacctgaccgataagatttccgataccgttaagacccagatgaagacggcacttgccgcggataccatcgatggaaagatctatggtgttcctcaatccgtgctccccggcggaatctggtattccaaggatttgtttgccaaggccggaatcaccgaggttccgacgacttggagcgaatttgcgacggcagtgcagaaactcaaggatgcaggcattacgctgattgccgtaggtggcaaggacgcctggcccgccgcgcattggtggtactggttcgcccttcgtgagtgctcggccgatacgtttgaaaaggcgcagtccaccaaggatttcagtgattcttgctggaccagaacgggagatgatgttcagaagttgcttgatcttgatgcattcaatgatggctttctgaccacgtcggcgcaacagggcgcaagctcatccgcaggtcttcttgccaaccatatggctgccatggagcttatgggaggttgggaaccgggtgtggtccgtgacctcactcccgacaagaaggatatggcggatcttgggtatttcgcttttcccaccgttgaaggcggacagggtgatcccagcgcgattatgggcggtttcgatggcatgaccgtaggcgcttgggcacctgaagaggctgtcgatttcctgaatttcatttcggagaaggaatggcaggagaagttcgccaaggcatttgctacgattccagcttctaaggaggcgcaggatgcggtgaccagtgacgcattgaagcaggttttgtcggtgtacgacaatgcgtcttcggtctccatgtggttggacacggtgttcggacagaacatcggcaacgcccttaatgagggtgtggtcaacatgatggccggcaaaggcagcgccgaagacatcgtcaagggtgttgagaaagcggctgccaaaggctgacgatatcgaccggatgtgggggcttgccggaagtgggcaggtccccacagcgcaaagaggagatttcacccatgtcaaagcgttgcgatcaaagcgggattcgaccgaatggtctgtcggatacggctcgtaagcatttcgagattggagtgctttcgattcctgccctagtgatgttcctcggttttgtgattcttcctgtgattatggcggcatattacggcttctttcgatggaagggatatgggaagccgcaggtcaacggccaattcgtcggattcgagaattacaagatcattctcacggatccgaactttcaggaggcactcggccatacgcttttcgtagtcgtcgcttccttggtaatccaaggccccctggccattcttttcgctctcctgctgaaccagaaatttaaaggccgtgctctgattcggaccctgattttcgtgccatacgtcgtatcggaagtcatcgttggcacgggttggagcctgatgctgcaaccgaccggcgcggtgaatgcggtattggcgaaattcggcatcagcggcgctgattggattgccgatccgaagatagcgatatggacccttatgttcatcatttcatggaaatatatcggcttcgccgtcattctcatgattgctggcatgcagtcgatccctgaagacctgtatgaggcggcaaaagtcgatggtgccggattctggcggcagcaatggagcattacgctgcctctgctggggccgacgattcgtatgtgggcctttatgtccatcatcggctccttgcagttgttcgatctggtgtacatcatctggggacagtacgtgtcatcgaccgcaggcacctccacaatggcgacatacatggttcgagaagggcgcttggcaaataactacggatatggttccgcggtggctgtggtgattttcgtcatttccttggtcatcgcgctgacatatcagcatattgtcatgaaccgtgacctggatggcgctttgacggatggcaagcgcgggaaacgttcacgtggaacaatcgtaacaagcgaggtggcatgagcatgactaccgtatctcaaacgagcggcccgaacgctcggggcaatacgcacgacccgtatgcgttgaggaaatcgtcaaagactccctggggccatcccattgtgtacgttctgtcccttgtattggttctgatttgcgtgacgccggtagtgtatatcatcatcggcggtttccgaacgaattcgcaaatcacgcgcgaccctgcagggatgccgaacccgtggaattttgaaaactataagacggtgttcgcttcgaacacgttctggagcgaactggtcaactcgctcatcgtctccttgggaaccatggtgggagtcgtggccctggcgctcatggtaagctttgtcatcgcacggtaccgtttcaggctcaataaggccttgtattcactgtttgctgcgggaatgatgtttccgatcacggtggccatcacgccgttgtacctcttgctgcgcaatctgcacctgatcaatagccacctcggcattgttctgcctcagattgccttcgggcttcctcaggcgatcatcatcatggttccttttttgaaatcgattcccttggaacttgaggaggccgccgaacttgatggttgctcacgactgggattcttctttaggatggtgctgccgctaagtggccccggcgtggctaccgtggccattctgacgttcgtcagtagttggaatgcgtatatgttgccgttgttcctgctcaatgattcgagcaagtatacgttgccgttgggcgttcagatgttcagttcgcaacattccgtggacactgctcaggtgctggcgttcacgtcgctttccatgattcccgccttgatctgcttcacgatcttccagaagaaaatcgtcggcggccttgccggcgcggtcaagggctgagagcgaaaggaaccctaccattatgcagatttccaaccccgtactcaccggcttccacgccgatccgtcgatgatccgagtcggcgacacctactacattgccaattccacctttgaatggtttcctggcgtgcgcctgcacgaatccaaggatctggtgcattggaacacattgcccagcccgttgagtcgcgtcagtcagcttgacatgaagggcaatccatcatccggtgggatctgggctcccgacctgagctatgcggatggcagattctggctcatctacaccgacgtgaaggtggtcaacggcgcattcaaggactgcgtcaactacctggtcaccgccgacgacatccgtgggccgtggagcgatccgatccgcatcaacggcgtcggcttcgattccagcctgttccacgacgatgacgggcgcaagtaccttgtgcagcagacttgggatttccgcgaatatcatcattcgttcaacggcatcacgcttaccgaattcgatgtggatgccatgcggctcaagccggaaacggcacgaacgatctgggacggtaccgcggtgaaggtggtggaaggcccgcacctgtacaggaaggacggttggtattacctgtttgcggccgaaggcggcacccaatatgagcatcaggaatccgtggcccgctcgcgtacgctcgacgaccattccttcgaggccatgcctgacggtccgttcatcggtaactacgacactcctgacttctacctgcaaaagcagggacatggtgcgctcgtggacacgccatcaggggagtggtattacgcgtccctatgtggtcgcccgtggcgtcatgccatcgaaccgtcgcatggcgtgcgcggctggtgcacgcttgggcgcgaaacctccattcaaaaggtggagtgggatgaggatggctggcctcgcgtggtcggaggccgtgcaggtcaacggtatgtggacgctccaaaggatgccattgaaaccgcggctccaccaagtcgcgacgaacatgacgaattcgaatccgacatgcttggcgtgaactggaacaccgtacgtgtgccgttcaccgaagccatgggcagggtcggcggcggcaaactgacgttgcgaggacagggatccctgtgcaatgcattcgaacagtcgatggtggcccgccgctggcaggcgttcgacttcgatgccgagacgaaggcgcgtttcgacccgaacaactacatgcagatggccggactgacgaactattacgacgacctgtgctggtcatgggcgttcgtgacctgggatgagggacgcggaacgcgcgtcatcgaagtggcgcagaacgacttcaaccagtacacctcgttcctcaaagacaacgccatcgaagtacctcgggatgccgaagccgtatggctgcgcaccaaggtacggacggaatactattcctacgaatactccttcgacggcgagcatttcactgagattccggtgcgactggacgctaagatcctctctgatgattacgtcgtgcagcgatatggcggcttctttaccggagcattcgtcggccttgcctgcgtggacctgtccggttacggcttgacggccgaattcgactacttcgactacaaggaacttcctgacggcgaatagctgtggctctttgaggcggcaggcggggaatcgatacctctgccgccgattcgccaatttgttagatggtcgaaataatatgttgcgtgaacgctcacaacatgcgcgggaaacggaagacgggagaggatatggcacgggatgcggaagcgctgatcaactctgacgaggaactgtccagactgttcggcggcaggccgacgcagtaccgcaagtcgaagtccttgccgaaatacaccggtgaggcggcgcgtgtctgtgcaaggatcaatcggatcttcttcgatgatccgggtgaggcataccgcctgttccacgaactcattccggaggcgggcgaaggcgtggaattcacgccgccgttcacggtcgattacggcatcgggctcaggattggccgcgacacgttcatcaacaaggatttcatgatttgcggcggtggctatgtgaccattggcgagaactgcctgattggtccgcgctgcaccatcgccaccccaaaccacgccaaggatgccgccacccgcctggccggttgggagtgcgcctcgccagtcaccatcggcagcaacgtgtggttcggcgcaaacgtgaccgtgacgccgggcgtgaccatcggctcgaactccatcatcggcgccggttccgtggtgacgcatgacattcccgaaaattccatagccgtgggtaatccggcccgcgtgatccgtgagattcccgatcatgatcccgccttccgtgaggtcgaaggcatcatctgacgtaggagtggggcggaggcttcatggtcaagaggggtgcaagggcggtatgttgtcatatcagctccatgtcggcgtgttgcgatattcgtacagtttgcgcactgataaatatttgaaaggcatgaaacagaagatcgatatcgctacttttgcaatgagatagctgttactgaatcgccacttagtaagttagatgaatgcactaaattgcgttggaatttcggcgtttccaatggaaatggcgaaacaatatgtttaatcaatgaactaagtgttagaattgttgctagaccacatgaaagaacatgtggttctcaaggaagagaaatcgcaagattcagtttcatcggcgaaaggaatctcatgaacaagtggaccaaggccatcgctgccgttgccgcaaccgcaatgctcatccctctggctgcctgtggaagctcccgcagcagcaactccggctccagctcatccaaagacgcttccgatgtgaacatcggcatttccatgccggagcagatgctcgagcgttggaagatcgacggttccaacctgaagaagcagcttgaaggctacggctacaaggtcaccctgcagtatgcggatggcaagaccgatctgcagacctcccagattcagaacatggccaacaacggcatggattacgtggtcgtcgcatccatcgatggcacctccaccggcgcggcctgcgagcaggcccagtccaacggcgcgaagatcatcgcctacgatcgcctgatcatgaataccgacgccgtcgactactacgccaccttctcgcttgaggaagtcggcaagatgcagggcgagtacatcgaaaaggccctcggcctcaaggacggcaagaaggggccgttcaacgtcgagctcatggccggttccccgaccgacaacaacgcgggttactacttcaagggcgcatggtccgtgctcggcaagtactacaagtccggcgtgctgcaggccaagtccggcaaggttccggccgacgagagcgaatggcagtccatcggcatcgacaactgggatcgtcagaaggcccagaacgaaatggagaaccgcatcaactccttctacaacgacggcaccaagcttgacgcggtcctcgcccagaacgacgccgaagccctcggtaccgtgaacgccgtcgaaggcgcaggctgggactactacccggtcatcaccggtcaggacgccgagaaggccaacgttcaggccatcgtcaagggcaagcagtccgaaaccgtgtacaaggatacccgcgagctggccaaggccaccgcgcagatgatcaaggacctggtcgacggcaaggagccggaagccaaggacaccttcaacaacggcaccaaggatgtgccgacccagctgctgaccccggtctccgtcgacaagaccaacctgaaggaggtcctcgtggacggcggttacatctccgccaaggatgcgggactcgagtagcggatccttacggaacaaggcgagcgccgcgcctgcaccgcgccggagcggcgctcgccttgttccccgaaagtcagtaagcaatcgtgaagcaatgacgcaacggaggaggttgctgtggctaccaataatgacgtgattctgcagatgaatcatatcgtcaagcgtttcggcccggtcactgcgctcaaggatgtgaatatcaccgtgaaacgtggccagatattctccatctgcggtgaaaacggcgccggcaaatcgacgttgatgaacgtgctgtcgggcgtgtacccgtacggcacctatgaaggcgatatcgtctacgacggcgagacctgcaaattcaagaccattcgcgattccgaaagcaagggtatcgtgattatccatcaggaacttgccctggtgccgtatatgtcgatccaagagaacatcttcctgggcaatcagatcaagaagggcatcgccatcgacaccgacgcccagcgcaaggaagccctgcgcgtgatgaatctggtggggctcaacgaaaacccggacaccctgatcgccaacatcggcgtcggcaagcaacagctcgtcgaaatcgccaaggccttgaccaaggatgtgcggctgctcattctcgacgagccgaccgcggccctgaatgatgaggattccttcaaactgctcgacctgatcgaccagttgcgcaaggaacacggcatcaccgccatcatcatctcgcacaagctcaatgagatcgcggcctccgccgatgcggtgcaggtcattcgagatggccagaccatcagccatatcgacatcgacgccgcacatccgctcgaccaggatgcgttgatccgcgacatggtcggccgtccgctgaccaaccgctacccggaccaccagtcgcatatcggcgccgagatgttccgcatcgagaactggaggtgtcaccatccgctcgacgagaaccgtctcgtgtccaaggacgtgtgcatgaacgtacgcaagggcgagatcgtgggcgtcgcgggccttgtcggtgccgggcgcaccgaaaccatgatgagcatgttcggccaccagtacggaacccacgccaccggcacactgtatctggaaggcaaggaagtgcacttcccgtccgtgcgcagcgccatcgacaacggtgtggcgtacgccaccgaggaccgcaaggtctacggcctgaaccttatggattccatccgcggcaacacttcgctggccagcctcaaggcactgagcaggttcggggtgatcgatgagacccaggagaagaaggtcgccgaaaagtaccgcaccgaattccgtaccaaggcgccgaccatcgaaatgccctcgggcaacctctccggaggcaaccagcagaaggtcgtgcttgcgaagtgggtggccaccaatcccaaggtgctgattctcgacgaaccgacgcgaggcatcgacgtcggcgcgaaatacgacatctacgagatcatcgaccagcttgccgacgcgggttcggccgtgatcgtggtcagttcggaactgccggaactgctcggcatctgcgaccgcatctacacgatgtgcaacggtacgatcaccgccaatgtggatgccaagagcaccaatcaggaggagctgatgcgctacatgaccgccgaggttccgatcgatccgagcaaggtatacgcctgaaagcctgaaatcctcaagtccaatgacgggcttgaaccgtgacttgaaccgtgaaaggaaacgcattcaaatgtcagctgcaaattccgccgccgtcaagaagggcgacgacaaggtagaaacccagtccctcaaggagctgctgctcggtaacgctcgctcctgcggcatcttcttcgcgctggttgtggtgatcatcgtattccagatcctcaccggcggccgtctgctcaatccgaacaacgtggtcgcgctgttccagcagaacgcctacgtgctcatcgccgcgataggtatgctgatggtcatcatcgccacccacatcgatctgtccgtcggctcggtggtcgccttcatcggcggcgtcggcgcactggccatgaagaattggggtctgaactggttcctcgccatcgtgctgatgatcgtcatcggtctggccatcggcgcatggcacggcttctgggtcgcctacgtcggcgttccgggcttcgtcaccaccttgggcggcatgctgatcttccgtggcctcgccaccgtcgtcgccggcgaatccattccggtctccgatccgaccttccgcgccatctccaaggattacctgccgaacgtcctcggattctggggagacttctccagcaacgcaatcatcgtgggagtcgtcgccatcgtgctcgtcatctggatgcagttgcacaagcgcaacaatgccatcaagaacggccttccggtccagccgatgagcttcgtggttctcaagctggtcatcgccgtcgcggcaatcgcctacgtgacctacctgctggcctgctccggcaacgccacccaaggcggcatcccgatcgtgatgctcatcatcggcgtgctcatcggcgtgtactggttcgcactgaaccgcaccgtctacggccgtaacgtctacgccgtcggcggcaaccgcaaggcggccatcctttccggcatcgacaccaaggcgaccgatttcaagatcttcctgaacatgggcttcctgacctccattgcagccgtcatcaccttgtcccgactggcatccgcaaccgcgcagaccggtatggagttcgagatggacgccatcgcggcctgcttcatcggcggcactgcggtcaccggcggcatcggcaccatcccgggcgccatggtcggcgctctgatcatgggcgtgctgaaccagggcctgtccatcatgggcgttgacgcagcctgggtcaagaccatcaagggcctggtcgtgatcgcggctgtggcctacgatctggtcagcaagcgcaagaagggctgattcctcctcctccgcaaggcgtcgtctctcctcttggaggggcggcgcctctttcgttgcgtccatgggcaaatgaacaaccgcaacccgtatggattgcggtttgccgttttttttacttgcgcctgcgttgtttggatttcttcggctcataaggcttgagaaaatcccatttggaaacaaggaaattatgtaccggtgggatcttgccgatgccgaagcctgcgaaaatgccgccaagcatcgtccatgtggccagatcctgtccggagaacagcagcacgatgtacacgatggcgatgatgaagcacagcagtgaagagacgcggcgttgccgttcggtcatcgtgctgttctgcatcggcattgcgcccaacagcaggcccgaggccaggcagattatgccaagcaccacggccatggcgatggatagcggagaagtcatcaacattcctttcgttacctgacatcactcggcatcgtcggaggattcgtcggattcctcggatttgctttcatcatgctgacggccttgcgcaatccatagttgcgccgcgttgaagccggtatacagcaccgccacggcgatgcagatgatcaggatgatgctgggggcggtcgtcagcgtgccgtccttcagcgcggaggtgacggactgcgccagccaggcgatgcatgcgatgcaggtcagtgcgtaaagcctcatacggaagccgtcgttcatattccacccgtctttcgagtatatgtgccgatgatagtcgaaacgggacggtacgtcaggtaccgccccgtttcgaatgtgcgtcgtgtgcgttcggaggatcagccgcgggccttggcgtaggcctcatagacggctggggtcggctcgccggtttcgacgccgtcgatggtgagcttccatgccggtggctcggtttcgccggacagcacccaggcggcctggcgtgcggcgccgatggccacgtactcgtcggtggccgggcgggtcacgtccatgccgaagatacttggggcgagcgtgcgaatggcctcggatttcgcgccgccgccgataagcaggatgcgcttgatctcggcgccgagggaacggatgagctccaggcagtcacgctgggagcacagcaggccttcgacgaaggcgcgcgccatgttctccttggtggtgttggccaatgtcagaccggaaagggtggcggtcgcgtccggacggttcggggtgcgttcgccgtcgaaatacggtaccagggtgatgccgccggcccccggttcggaggcgaaggccagcttggccagctcgtcgtagtccactccgagggctgcgcggccggcatcgagaatgcgggagccgttgatggtgcaggcgagcggcaggtaatggccggtgcagtcggcaaagcccgagacggcacccgtcagatcgtaggtcgggttttcggagatggctgcggccacgccggaggtgccgagggatacggatacgtcaccgaccgccatgcccagtcccagcgaagccatggcgttgtcgccgccgcccggtgcgatcaggcatccgccgtcgacgtttccgcctgcgattgcgggggaggccttgactgccgccgcgtcgcgcggtcccaatacggtcggcaggacgatggcgtcggcatgcgccttggcggattgatcgccttcggccggctcgagcaccatggcgatcaggtcgcggcggtattcgccggaggcggcatcgtaatagatggtgccggaagcgtcggaacggtcggtgaacagggcgtcgagatgggcgtcctcaccctcggcgaccgggccgtagccggcgatgcgccagctcagccagtcgtgaggcaggcagacggccgcgatcttcttggcgttctcaggttcgttttccgcaacccaggccaccttggtcagcgtgtaggaggcgacgggggaggagccgacggccttgacccagcgttgcttgcctcgggcgattggatcttccggttcgccgtcgacggccggggcggcgcccatcttttcgatcagggcggcggcctgcggagcggagcttacgtcgttccacagcatggcgtcacggatcacgttgccctgcctgtccagaatcaccatgccatgctgctgtccgccgacggccaaggcttcgacgtcatccagtccgccggcctgttccgcggcctgaaggaacgcatcccaccaatacgaagggtcgatggatgtgccgtttgggtgcttcgcctgaccgaaacgcaccagctctccggtttcggcgtcggtcacgcgcaccttgcaggattgggtcgaggtatcgacgccggccacgagttttctggtcattatgcctccttgccgtgagccgtgcgtcattggacacggacgtcggccacgctctattagttagatgaatgaactataatgtccagtgtaccatcataaattggtttgactaactgatttggtgtactttccttgcaaagtcgcgtcgggaaggagtgtcgatgacatcgctgagaagaatcaaccaagatgatctgcgcaatcacaatctttccgtggtgctcgactcgctattgcgggccacggatcagctcagtcgtgccgacctcgccaaggagacagggctgaccaaagccaccatgtcggtgctggtgtcgttgctgatggacaacggcgtactggaagagggcgtgcccaccggacaatcgctatatggccgccccagcatcccgttgctgatccgaggcggtcggctgtgcggcatcggcctgcaggtcaataccgacggctacggcatcgccgtgctcgacatcaacggcaccaccgtggacgagcagtgggtggatgccgatatgacgaacgccaatgccgacgaagtgttccgcaaccttgatgaactcgcaaaatcacaggaggcgtcacttgaccgtatggggtatacgctggtcggctcggggctcgcattgccgggcctggtcaccgatgaccttcgtctgctgggagcgcgcaaccttggttgggagcatcttgacctgaagaccttcggcgtggtgcgccgactcaatccgaaagtcgacaacgaggcgaatgcggccgcattggcgcagattcccggttatgccacgcagcgcaggggaatcggactggtcgaaccgaccgactccttcatctacctgtccaccgatgtcggcatcggcggcgccgtggtgcgtgacggccatgtggtgcggggcgatcatgggttcggaggcgaactcggccatgtgtcggtggatatgcgcggaccgatctgccgttgcggtcgccgcggatgcctggaggtgtacgcaggccgtcgatcgatggtcagcgcagccggcatcgccagcagcgatgccgcggccacgcgcgaatcgatcaacgagctgatcgaccattggcgccagcgcgactccaaagccgtggccgtggtcgagaaggccctggaggccatggcctcggtgattgcgtcgatcatcaacgtatgcgatatcgataccgtgatgctcggtggcctatgggcgcatttcgaacccgacctgatccgtcggatcggacgcatggtgcgaccgcaggcgctgtcgtaccctgaggtgcaggcccgggtgatgatggccgatgtcgtggcgcggccggccctgatcggggccgccgaagtgggtctgcgcaactttgtggacaatcccctggagtttctcgaacgggagtagtccacccgtttgctagactgggcaagttggcatgttcgcatgttgcaacgtggggcgttagctcagtcggttagagcatcggactcataatccgccggtccacggttcaagcccgtgacgccccaccattctctccgggcattggcaggtacggttttacagccggccaagaagcgctcagcgaacagatgagacaaagtccggccttctgctataatcccaaaggttatctggttcacgctctgccataggggcattgcgacccgggtcccccgaatctctaggagacaattatgcagcagggtattcatcctgattatcacgcagtgcaggttacctgctcttgcggcaacaccttcgtgacccgttccaccgccaagagcgatcatatgaccgtcgacgtgtgctcgagctgccacccgttctataccggcaagcagaagatcctcgacaccggtggtcgcgtggcccgcttcgagaagcgctacggcaagaaggccaagtgattcttattgcctaggcaatgaaaacgccagcccgttatggactggcgttttttcgtttccggggcaccttatatgatgaacaggttgagtaggtttcggcgacgctgaaaaaccgtgaacaagtcgctgaaaatcatgaagtaaagaaaaggcgtacattggcagacgaacagttccccgcagcggtcaccgcgcttgaggaataccgcaatatcgaacagcagatggccgagccggaagtcgcatcggatcccgacaagatgcgcaagctgggtcgtcgccatgccgagcttggcgcaatcgtctccgcctacaccgtctataagcagacgaaggatgatctggaagccgccaaggaaatggcttccgaagacccggacttcgccgaagaggccaagcgactggaaagcgaattgccggagatcgaggagaagctgcgcaccgcgttgattccgcgcgatccggacgatgcccgcgacacgatcatggagatcaaggccggcaccggcggcgaggaggccgcattgttcgccggcgacctgctgcgcatgtatatgaggtatgcggaaaagcgtggctgggcagtgaccctgcaaagcgagaacaccaccgaattaggcggcgtcaaggacgttcagctggccatccgcgccaagggaacgcctgcgccggaagacggcgtgtgggcatcgctcaagtatgagggcggcgtgcaccgtgtgcagcgtatccccgtgaccgaatcgcagggccgcatccagacttccgcggccggcgtaatcgtgttcccggaagctgatgaggatgacgatgagatcgatatcgatccgaaggatctcaagatcgatatcttcatgagctccggtccgggcggacagtccgtgaacaccacctattccgcggtgcgtatgacgcacattccgaccggcatcgtggtgagcatgcaggatgagaaaagccagatccagaatcgtgcgtccgcattgcgcgtgctcaagagccgtctgcttgccatgaagcatgaggaggaagcggcccaggccgccgacatgcgtcattcgcaggtgcgttcgctggaccgttccgagcgtattcgtacgtacaatttcccggagaatcgcattgtcgatcaccgcaccaattacaaggcctacaatcttgacgccgtgcttgacggcgatttgcaggccgtaatcgacagtgacattcaggcggatgaggccgaccgtcttgccaatcagaagtaagggttcgagtgactgacgtggcgaagcccctccccgcatcggcgcggtcgaccggagacgagaccgtggcgaccatcgtccgcggtgccgcggccatgctgcgcgccgcaggcgtggatacacccgaacatgatgcgaaactgctgtgcgcggaggcgttcggcgttgatctgcagagcgtgaacaaagccatgctgctgggcgatgggcttctcggactggccgaggatcccgtgaaaccgctcgaagcattccacgcgatgatcgaccgtcgtgcccggcgcgaaccgctgcagcacatcaccggccatgcgccgttccgctatctcgatttgaaggtcggtcccggtgtgttcatcccacggccggaaaccgagctgattgtgcaggaaggcatcgattggatcacccgcaacggcggataccatgcccgtgtggtcgacctgtgcgccggaagcggcgccatcggtctggccgtcgtcacggaagtgccgggcagcgaggtgtgggccgtggagaaaagcgagcgaaccgccgaatggacccggcgtaacctcaatgagacggcccaagcgcatcccagcatcatcggcaattatcatctggaaatcggcgatgccacgcagatgccgacactgcaccaactggacggcaccatcgacatcgtgctcacgaatcctccatatgtgccgctcagcgaaatacccgaacagccggaagtgcgcgactatgatcccgacatggcgttgtacggcggttccgccgatggcacgctgattcccgaacgcatcatcctacgcgcaggcaaactgctgcgaccaggcggtctgctggtcatggaacacgacatttcacagggcgagcgtctggccgcttatgcgaacgcgcacggcttcgccaacacccgggtacgcaacgactacaccggcagaccccgatatcttatttcgggaaaatcgtgacaattccgcagaaccgtactataacggactgcgcttggtagacgagaagggaacgaacggcacatgagattcaaatatgccgaaaggctggccgtgctatgtctcgcagcggcgacgacgctgtccgtatccgcctgttccggcggcaacatgtatgcgtcaagcaacgacagcagcagcatcgcggacaacgatgtgatcaccatcggatcggtcaccaccaattccggtgcagccgccgcctatggcgaatccgaagtcagcggcttcaagcttgcaatcaaggaaatcaacgagaacggcggcattttcggcaagcaggtcaagcttgaatccatggacgacaagggcgacgtcatcgaagcgtccaatgcgttcaaccgtctggcaggcgagaagaacgtcattgcggtgctgggaccgaccatctcgtcgacctccggagccgtggcgccgctggccgaccagaatcagatgccatccatcgcacctgccgccaccgccgactccgtggaaaccggcggatacctgttccgtacatgcttcaaagactcctatcagggcgagatcgcggccaagtacgccgccgagaccctgaaagtcaagaaggtggccgtactctacggcaccggcgatccctattcctccggtgtgggcaaagcattcgtggcagccgcaaagcaagccgggcttcaggtcgtggccgaagagaactcctccagcaccgacgataccgaatactcgtcacagctgcagaaaatcgaggcgtccggagccgaattcctgtacgcgccgtactattactccgccgttggtccgtatatcgtgccgcaggcgcgctccgtcggctacgacggctacatcatgggacccgatggctatgacggcttgaagaccaccggcaacaaggctcgttacgataaggtgctctacaccacacactattcaccggacgacaagtccaacaagaaggtgcagcggttcatcacatcgtacaaggccgccaacaacggcgagtcgccgaacaccttcaccgcgctcggatacgattccgtctacatgttcaagcaggccatcgagcaggcaggcgaacacgccacccgcaccgacatccgcaacgccatcgccggcatgaacttctccggcgtcaccggcgcattcacgcttgacaagcacggctccccgaagaaatcggtcatcgtgctggaaatgaagaacggctcaccgacctacaaagacaccattcagccggccgaataagccgcataacgcaacaagaaaggaggaatgatgggcgatcagatcatcatgttcatcagtcagatcttcaacggtctgaaaatcggcagcgtgtattcgctggtggcattaggctacaccatggtctacggcatcatccgactgatcaacttcgcgcacggcgacttcatcatggtcggctcctacgtgctcatgcttaccattccgttcatcctcgcctgcggtcttcccgcatggcttgccgtcgttcctgcgattctcgtatgcgtggccgtcggcgtgatcgtcgaaaaggccgcctacaagccggtgcgcgaaaagggcaacaacatgaccgccctgattaccgccatcgccatgagcctattgctggaaaacggctcccaggcgattttcggcgccgactatcagactgtgcccaccgtcatccagattccgaccttggcgctcggtgggctcaagatcgacggtgccaccatcctgacggtgctgttgggcctggtcatcatggtcgcgctgcagctgttcgtgacatacaccaagcaaggcaaagccatgcgcgcggtctccgaagacaaggaagcctcgattctgatgggcatcaacgtgaactccaccatcaccctcaccttcgccatcggctccggtctggccgcggtggcctcgctgatgtactgcgtctcgtatccgcaggtttccccgatgatgggcgccatgctgggcctgaaagccttcgtcgccgcggtgctcggcggcatcggttccattccgggcgccatggtgggcggtctggtgatcggcgtggtcgaaagcctcaccaaggcgtatatcggcaccatcaccgctggcgtgatcacatcggcgttctccgatgccatcgtgttcggcatcctgatcatcgtgctgctggtcaagccgtccggtctgatgggtgagccggaaagcgagaaggtgtgatcatgaagaaatcgatgctttccatcaagcagtcgtatctggtatgcgccatcggcgtggcggtgctgttcggcctgctcatggccgtgtgcgaaaccggcgtggcctcgctgtatgtcaagggcatcatcatgacctgctgcattgcggtgatcatgaccacgtcgctgaacctcaccatcggcgtgctcggccagcttacgctcggctgttgcggattcgaggcgatcggcgcctattcggcggctttgctcagcaagttactcgtcgccaacggcgtgcagatggatgcgacgctacgattcctgctcgtcaccttcgcgggcggtgtggttgcctgcatcttcggcatcctggtcggcattccggcattgcgactgcacggcgattatcttgcgattatcacgctcggcttcggtgagatcatccgtgtgatcatccagaatctgaaagtggccggaggcaagggcctgtcggaaggccagcagggacaggcactgatcggcatcgaccgtcttgccaatctgtatgtggtcttctggatcaccgtcgtgaccgtggtgctgctgttcatgttcgcccgttcacggtacggccgtgcggtcaaggcgattcgcgacgatgagatcgcggccggcgcgtccggcatcaacatcacctacctgaaggttatggtgtttgcgatttccgcgttcttcgcgggcatcgcgggaggtatcttcgcgcagtacatcggcgcgttgacgccaagcatggctggctggctgcagtcgatcaactacgtgatcatggtggtattcggcggcatgggatcactcaccggctccatcgtggccgccgtgggcctgacgattctgcctgaactgctacgtgccttctccgaataccgcatgctggtctattcggtggtgctcgtgctcatcatggtgttccgtccgcagggcatcttcggcaactgggagttctcgctgccgaaactcgtgaacaagctgttctatccgtcgcgcatcaaggcgcacggcaggtccgccaccgtggcaaaaaccgccgggaaatcctccgatgacgccgatgacaaggaggcgaaggcatgagcgaaccgattctgcgcgccgaacacctcggcatcgccttcggaggcctcaaagccgtctccgacttcaacatgaccatcaacgcgggcgaactcgtcggactgatcggcccgaacggcgccggcaaaaccaccgtgttcaacctgctgaccggtgtgtatcagccgactgaaggcgaattcttcctcgacggcaggcgtatgaacggcaagaaaacgtatcaggtggtgcgtgccggcatcgcaaggaccttccagaacattcgtctgttcgacaagatgaccgtggaggagaacgtgcttgtcgcgttcgaccagtccttcacgtatcggttgggcggtgcgatcttccgaacgccgaagttctggaagcaggagcgtgacatgcatgccaaggccatcgacctgctgcgcatcttcggtctggaaggtctggccaacaccgaagcggcgaatctgccgtacggtgcgcaacgcaagctggaaatcgcgcgtgcgctggcgaccggcatgaaactgctgctgctcgacgagcctgcggccggcatgaatcctacggaaaccgaagatctgctgcactgcatcaacgtgattcgggatcgtttcggcatcgccatcctgctcatcgaacatgacatgagtctcgtcatgaacgtgtgccagcgcatccaggtgctcgactacggacgcaccatcgcatcgggactgcccgaggaaatcgccaacgatccgcaggtgatttccgcgtatctgggtgccgatgacaccgacgaaaccgccgaggggagggaagcctgatgctggaaatcaagaatctgagcgtctcctacggggcgatcgaagcggtcaaagacatcagccttaccgtgaacgacggtgagatcgtatcgctgatcggcgcgaacggcgccggcaaaacgaccacgttgcacaccatcacgggcctgactccggcgcaatccggctccgtgatgttcaatggcgttgacctgctcaaaacgcacagcaacaagatcgtgacccttggcatggcgcacattcctgaaggccgccacgtgttcacgcgcatgagtgtgcaggagaatctcgagatgggtgccttcagcctgaaggaccgctcccacatggccgccgacctgaacatggtgttcgactacttcccgcgactgaaggaacgccgtaaccagctggccggtacgctgtccggcggcgagcagcagatgctggccatggggcgtgcgttgatgagccacccgaacacgattctgatggacgagccgtcgatgggtctgtcgccgaagctggtcaaggagatcttcgccatcatccgcaagcttcatgacgaaggaatcaccgtactgttggtcgagcagaacgcgaaaatggcgctatcgatcgccgatcgtgcatatgtgctcgaaaccgggcgcatcaccatggaaggcgatgcacaggatctgctgcatgacgagcaggtacgcaaggcctatcttggtgcgtaatgttctgccttacaatggtgaggtcgacaaggctatgagggaggtgtcatgagcgaggttcgcacaattacggacgaatccctggcccaggccgtcgaaatcatacgtgacggcggattgatcgtgattcctacggatacggtgtatggcgtcgcctgcgatccacgcaacgtcgaggccatcaggaaaatctacatggtcaagcagcgaccgaaatacaagccgttgcaggtgctgttggcttcgatcgacggtctggacgcgcttcggctcgatcttccggtgccgttgaaccggctggccgccatgttcatgccgggcgcgttctcgccgattgccgaagcgcgagacaactgttcgctggccacgattcgcagggatccggccaccggcaaaaccacgcagggcgtacgcattccgaattccgccgccacattgcgcatcctgcgcgcagtcggcccgctggcggcaaccagcgcaaaccgttccggcgaggaaagcgcgcagaccgtcgacgaggcggtcgaggccttgggcgatgccgtcgacctgtatctcgatggaggggcgacgccagggcatgtgtcgtccacggtggtcgcggccgatcctcacggacgcgacggtatctcgatccttcgagagggagtgatacgcgaagccgtgatccgtaaggcgctgaccctgaatggcggtgcattgggcatatgagaatctacctgttcatcgcggccatcgccggcggagtcacctatctgatcacaccgttgattcgccacgtcgccatcgaaatcggcgccgtcggagaggtgcgcgcacgcgacgtacacaccattccgacgccgcggctgggcggtctcggcatgctcatgggctttacggtttccatgctctttgcgtcgaagatcccgttcatcgaagtgctgttcgcgcaatcgaagcaggcgtgggtgattcttgccggcgcggtcatgatcagcctgctcggcatggccgacgacctgtgggatcttgattggatgctcaaacttgcagggcagctgctgatctccgtattcgtggcatggggcggcctgcagatcatctcgctgccattgggctcgttggtgacggcatcgccgagtctctccatggccatcaccgcgttcctcatcgtcgcctccatcaatgccgtgaatttcgtagatggtcttgacggcctcgcctccggcatcgtcgccatcggtggcatcgcattcgccatctactcgtatatcatcgcccggaattcgccgtcgtacgcgtcgatggcgacgttgatcgacatcgccatggtcggcatgtgcgtcggattcatcctgcataactggcatcctgcgaaactgttcatgggcgattccggttccatgctgctcggctatctgattacatgcgcatccatcgtcatgaccggccggctcgatccggccaccatccatgccagcatctatctgccggtattcatgccgattctgttgccgattctggtattgttcctgccgattctcgacatgtgcctggcgatcgtacggcgtgtgagcaaagggcaatcgccgatgcatcctgaccgaatgcatctgcatcaccgcatgttgcgcatcggtcattccgtgcagggagccgtgctgattctgtggggctgggctgcgctgatcgcattcggttcgattatgacgttgttcttcaaggcgcagcatgtgctgatcggtttcctgattgcgaccgtattgctgacgatcgccacgatgtatccctatctgaaacataggattccggaattgcgcgaagagaacgcccgggccgacgcacagcatgccaggcacgactgagccgcatccgcgaatcctacggaaacgatgcacccctatgaacggccacggggttatgtgacgtaccggccttacgattggtttccgtgtagattccgtcgtgtcgcgctaagtcagcacgcgttcatatagtgtgtctatggctacaattcctgatatgaatgcagattccacgtacgctccacttccaccgattttcgctcagcttggcctcgcttatgatgatgtgctgttgctgccgaacgagacggatgtcattccgtccgaggtggacaccaccactcatctgacccgtaacatcacgatgaaggttccggccatttccgccgccatggataccgtcaccgagtccgacatggccattgccatggctcgtaacggcggcatcggcgtgctgcaccgcaacctctccatcgacgatcaggccgctcaggtcgatgtcgtcaagcgttccgaatccggtatgatcaacaatccgctcaccgtgagcccggatgtgacgctggccgatctcgacaagctctgcggccgtttccatatctccggcctgccggtcgtcgataaggacaacaagctcgtcggcatcatcaccaaccgcgacatgcgcttcatcgcttccgaggattacgatcacctcaaggtctccgacgtgatgacccgcgagcatctgatcaccggtccgtccaacatctccaaagaagacgcccacgacctgctggccaagtacaaggtcgaaaagctgccgctggtcgacgccgaaggccacctgaccggtctgatcaccgtgaaggacttcgtcaagaccgagcagtacccggatgccaccaaggacgagcagggccgtttgcgcgttgccgccggcatcggtttcctgggcgatgcctacaaccgtgcctccgccttgatggaggccggcgtggacgtgctcgtggtcgataccgctaacggtgaggccaagctcgccctcgacatgattagccgtctcaagtccgattccgctttcaagggcgtcgatatcatcggcggcaacgtggcgacgcgtcagggcgcacaggccatgatcgacgccggagtcgacgccgtcaagattggcgtgggtccgggctccatctgcaccacccgcgtggtcgccggtgtcggcgttccgcagctcaccgccgtgtatgaggccgctcaggcctgccgtgccgccggtgttccatgcatcgccgacggtggcatccactactccggcgacattgccaaggctcttgtggccggcgcatcctccgtgatgctcggcggcaccctcgcaggctgtgaagaggctccgggcgagaaggtgctcctgcacggcaagcagtacaagctgtaccgtggcatgggctcccttggcgccatggctccgcgaggcaagaagtcctactccaaggaccgctacttccaggccgatgtcacgtccaacgacaaggtcgttccggaaggcgtcgaaggcgaagtgccgtaccgcggacctctcaacgccgtgctgtaccagatgatcggcggcctgcaccagtccatgttctacatcggcgcccacaacatcgccgaaatgccggaacgcggacgtttcatccgcatcaccgacgctggtctgcgcgaatcccacccgcacgacatcgtcatgactgccgaggcgccgaactactccggtcgtcagtgagcctgaccggccggtgggccgggcggcagctatgaggtggtatcgaacctttatggtttgatatcaccttttgtttgtaggtactgaatgacttggaacgggccgccataatggtccgccatgtgattgaatgggcttttgcctgtgagaaccggtccgttacccaacggttgcgtccccaacccctgctgttgcgggccgtgtcctgcaagaaccatcccattgcccgacagtcattccccagaccccaactccggaagccgtatcctgcgagagccgttccgctgcccgacggctacgtccccaaccccctgctgtcataggccatgtcccgcgagagccgacccgttgcccgacggttgcgccccccaaccccgccgttgcgggccgtgccctgcgagaaccggcccattacccaacagctacaaccccgaacatggtcatcaggggccgcgccccgcgagaaccggtccgttaccctgcaaccgtgccccaacaccacatctggagctgtggccgtagagaaccggcttattgccccaaaaaccagtcactgagaatgattcccgcacgaatccgatgcatttcgagtgcagatgaatcaatccccggtccgaagaccgtctatgacaaactgggttgcattcgtacgaacgggcgaggcactccggcttggcagagcttgcttaccaggccagttcgattcactgcgtcttcgtaatacaaacgtactattttggtcacgccccaactgcagagcgactgctcgcgatctcgttgttcattgacgattgtctggatgtttttcctgtcggtcatcatgggatcggtgtacttcgccatgccatcatattcggcgacgataatccgtccgtcaggcaggaaccagatgaaatcgacccgataccatttaccgccaccggatggatcatggattacgtgctggatgagcggattttggaatccttcctcgatcatcgttgcgcgggtgaacgattcgcctccgttgtcggatagtgggttgcagtacgcaagcagtttcttcaaagcatctgtgtttcgccgaatccttggaatgaggtccatgattttctcgctaagctctgaatcctgtgccattgcggaatcgaagatgggcaacaccttgcggaaagggaacatcaacgagcagtcaagaagcgtccgttccggtgtggtgacgcgtattccgttgatgattcgttcggaaatccttggcatgtagatgcgcccaagagcatgattcgtaggtttttgattgccgcgcgagcagtccgcgcggtatattccgcttgcatgtatgctccatggatgttcatatccatatacggccactgcgctcggaccggcaaagatgattcgtggattttggatctgcagggcgcgaacctgatgaatggttctttgtgcagggtccaatgtgttccagtattcgttctccatgaagaggccacggtgcggcgagcaaagttccccgtgctccactcgcttacgcagcgccttcccgtcggcctgcgttgcggggatgacgcatcggctctcacgctttgcctcttgaagaagttggacacatcgcttgttcgttctcatgagagcgaagataaatcatttggtttgtgcggatgatgttttttcgtcctgtggtcggagaatggcctattggcgtgtcggaagctgaagaaccttgaaaatccaaccttttctgatgtggataacttctcccattgtcgcggcatggtattggtccatgggccaacgtgggcaattatgggacgtgactgttgggcaatgggccggttctcgcaggtggcggcctgcaacggcgggttcggggacgtagccgtcgggcagcgagccggttctcgcaggacatggcccgcaacggcagggtttgggggcgcaaccgtcgagcaacgggtcggctctcgcgggacatggcctatgacagcaggggctggggacgtagccgtcggataatgggccggttctcgcgggcgctgcctctgatggccatgttcggggctgtggccgtcgggcaatgggacagttctcgcaggttgcacccccggaggtagggcgcctgttggtcagcgggacggttcttacaggacacggcccgcgacggcaggatttggggaagttggggcaatcaatgcacgcgttccgtggtgcttcgtagcacaagggaagtgggtatgacggagaacggctcctccaaggtttcgcctgccagcaacgcgagtgtcttacgtgccgcaatgcgtccgatttccgtaggattctggtgcatggtggtcatgtccacaatcgaggcgcttggatcgtcatcgaatccgactacggatacatcctgaggcacacgccatcccatgcggcgcagttccttgagaaggggaacggccgccgcgtcgacggatacgcagatgccggtcggctgttttggtgcgctgagcagttgtgcgacgatgccggaatagatgtcctgttcgttttgcacgtccatatgggtcaacgatggcacgatgataatgtcatcatcgccgtagccgcattccttggcggcgtccagaaaccctttttcgcgcacgatgtccgagcagatgaacggtgaggcgttgacaggttgcccgatgtaggcgagcgtcttgtgtcccagtgacttgaggaagcgtacgattgcgctcatggccgccgcgtcatcgattgcgactccggcgtcgagtccgtgcgtgctgggggcgttcatgccgaccacagggatggtcagttcgccgagtacccgcttctttgcctcgtcgaagtcgaaggatgcttcgatgattgcgtcgacattgcgattgcctggcagattctggaagaaacgatccagatcttcctgcgtccacacgatgtagggaacgacgtcgtagtcggcctttgacatcacctcgtagatgccttcgaaggcgtgggagttgaaccagctgctgatttcgctcggcaacagcaccgcgatacgcatggttttgccggatgccagggatgatgcgcttttcgagaaggagaagtggagacggttggcctctttttcgacacgttctctggtttcggggttgactctgtccagtccacgcagtgctcgggatacggtggagacggatactccggccgccttggccacgtctgcgatggtggtgcgagtcacgttcggttctccttaagtcgggttttgcgattcatatttgcttcgttcgtcaccctaccatatcacgacacgcccattttgtaaaaacgcttgcatgactgcaaacactgtaattattgccttttctggcatactttgaagatggctgggattatgacttgcaaaaatttgcgcaagcgctattatgagattagtcaaccaatgcacaaacaacaatgtggttgcgaagaatagtcaaataattgcaaggaaaatcaatgctgcctagcaatgatgggtgacattgattgccgttaaaaggtgtacaaacgcttgcatgataggaggaaaaaaatgactgaagtcaccgatcccgcactgtggtggaagcaggccgtggtctatcaggtctacccgcgttccttcaaggactcccgtggcgagggactcggccagatcgccggtgtgaccgaaaagatcgactatctgaaggaccttggcgtcgacgccatctggctcagtccgttctatccgtcccagctggccgacggtggctacgacgtggacgattaccgcaacgtcgacccgaagctcggaaccatggatgatttcgacgaactcgccaaggccgcacatgcacgagacatcaaggtcgtggtcgacatcgtgccgaatcacagctccaatctgcacgaatggttcaaggccgccctcgcagccgaaccgggatcgccggagcgtgaccgctatatcttccgcgacggcaagggtccgaatggcgatcagccaccgaccaactgggagaaccatttcggcggcccggcatggacccgcgtgcccgacggccagtggtatctgcatatgttcaccaaggaacagcccgactggaactggaacaatcgtgaggtacgcgacgattttctcaggaccttgcgcttctggctcgatcacggcgccgatggcttccgcgtggacgtggcgcacggcttggccaaggatcttgaccgcgatgacctcgatgactatgtggtctggtgcaccaacgaccagccggaggacggttcccatccggtaatcgatcgtgacgaagtgcatgacatctatcacgagtggcgcaaggtgttcaacgagtacaatcctccggcgttcgccgtggccgaggcctgggtgcgtccgagccgacagcatctgtatgcctcgccggacgatcttggccagatcttcaacttcgaattcgccaagaaggactggatccgcgacgacatgcacctggccatcgaggaggggttggagagcgcggaacgttccggctccaccgctacgtgggtgatgagcaaccatgatgtgatccgtcatgccacccgttacgccctgccgcaggtgccgaccggcgaatatcatcgtctggcgcttgattggctgctgcgcgacggcaccacgttcaaagagaatcgcaagctcggcaccaaacgcgcccgcgccgcgatcatgatggagatggcgttgcccggttccgcctacgtgtatcagggcgaagagctcggcctgttcgaggtggccgacattccgtgggatgaactggaagatccgtccgcatggcgtacgtcccgttccgccagcaccaagggccgtgacggctgccgtgtgccgttgccgtgggtcgccgcggacgcgccgaaactggatgatccagacgatgaattcggtcacgacggttccttcggattctccccggccgacgccactgccgaaccgcatctcccgcagccggcatggtacaaggattttgcggtcgacgtggaatccgccgatcctgattccatgctgaacctgtaccgccgcgtgctggcattgcgccatgacatgcagaccaccgacctgagcgtcgaatggctgccggaagaccgaccgggcaaagcgcatgacggtgccaatggattccccggcggcaccatcgcctacaagcgtgccaatggatgggcctccatcaccaacttcggcgaagaaccggtcgcactgccgcagggcgatgtgctgctggcctccggaccgctcaccgatgacggcaggctgccgcaagataccagcgcctggctgaaattggccgactaatcgcaaacatcgcgtaaaggggataatcatgtcgaaaatcactacggtcgcatccaccgtgccggtcgtaacggaggaaggatcggcggataatgccaagtggcgtttcaccggaggctttcttgccttttcggtgctgtccggcgcggccttctacatgacgatgtcggtgctggtgccgcagcgcctgcgtgacatcggcatcgccaactccactgcggtgcttggcaccatcaacgcggtcggctcaatcgcttccatcttcatcgcactgttcatcggcgcgctatccgaccgcaccgcaacccgttggggcaggcgtacgccatggatcttctgcggcgcgttcatctacggcgtctgcttctgggcgttgagccgtccgatcagtgccgtgatcatcggcctcgtctacgtgctggcgttgatcggtctgaacatggtgcaagccccgatttacgcccgtatctccgatcaggtggctccgacatcgcgtgccaccgtgtccgccgcaatcggcgcgggcggtgtgatcggccagggcatcggtacgttggtcggctcctcgctgatcgaacatatggaactcggcttcatctgcgcaggcatgtgtgcgctggccgcgggcgtactgtccgtggtgatcgccccacgcgagccttccagtgaaaacatgccgaagaacaccgacgagccgctgtggaaggtcgtggcggcgtcgctcaccccgccgctgaagaattgcgccgacttctaccgtgcgttcatttgccgcacctgcctgatcgtcgcctaccagatggtgttcagctatcagctgtacatcctgcaggattacatcggccaagacaagctgtcggcggcggcttccatccaggtcatttccgtgatcaccatgatcgtgtccatcatcgcgtccctggtggcaggaccgattgcagacgctctgaaccgccgcaaggcgccgatcatcgtggcatgcacgttcttcgccatcggtttggccatgccgtggattttcccgacgcaacagggcatgttcctcttcggcggcatcgccagcttcggctatggcatgtacctgtccgtcgaccaagcgctgaacgtcgatgtactgccgaacaaggaaaccgccggcaaggatctcggcttcatgaacatcgccacctgtgcggggcaggccatcggcgtggccatcacctccacgctggtgagcgtgctcggctcctacacggtggtgttcccggtggccatcggcatgaccgccatcgccgccatcagcgtgctgggcatcaaacgcgtgcgctgaacaacgaaccggagcgcaccgcataccgcagggcggggaagaatctccctaccctgcggtatcttcatatgttcggctccacgcagcgggcgcggccgcaaacatatgaaacgaggcaacaatggtagatgcgcatgacggcgaaacatacaccgctgaaggctcgcgtctgatctggatcgactgcgagatgaccggcttggatatcttcggcggcgacgaactcgtcgaagtgtccgtagtgccgaccgacttcgatctgaacgtgcttgacaagggcgtcgatttcgtgatcaagcccagccagaaggccgtggatcatatgaacgacttcgtgcgcaacatgcatacccgctccggcctgatcaaggagtgggaacacggcctttctctcgacgaggcgcaagccaaggtcgtcgaatacgtcaagcgattcacgccggacggcgtcaagccattgctggccggcaacaccatcggctccgacaagaagttcctcgaccattacatgccggaactcatggagcacctgcattaccgcaccatcgacgtaagcacgttcaaggaacttgcccgtcgctggtatccggccgtctacctcaaccgtcctccgaagaacggcggtcaccgcgcgctcgccgacatcattgagtccctggatgaactgcgttactaccgcaaggcgttcatggcgccgacgccgggaccggatgaggccgaggccaaggccatcgccgacgatatcaaggccaccagtctgatcggcgagaactgatcgattcgggcgtatggagtgacggcggtccatgccgtccgtgatgtttccccgacaatcgaaggcaatgcaggaaaggacccttatgagcgcagccgactggaccaccatcgaccagccgcaggatatccgactcgtggtcgccgatatggacggcaccttgttggacgaacatggccggattcccgaaggcttctgggacatgctcgccagactgcgtgcgcgcggcgtcgaattcgtgccggcttccggccgccagtacgccacgctgcgcaacatgttcgcttcgaaggcgtccgaagtgctggacgggggagagctttcctatatcgctgagaacggcaatgtcgtggcggtggacggcaaggtcgtcgaagtacatggcgtcgatctgggcatcacgcgtcgcaccatcgacatggtgaccgcctccgtgtccgccggcgaatacgatatgggtctggtgatctgcggtctcaacaccgcatacgtgcagcgtaccgatacgccgttccttgacgaggtcggcaagtattacgcggcgttgaagatcgtcgatgacctgcgcgaggtgctggatttcgccgtcgaaccggacgattacgttccgggcgaagaaatcatcctgaagctcgcgattctcgatttcggcagttccgagcagatgacgaacaacaagctcgctcatgtaaggaacgattaccaggtggtcgtctccgggcagcattgggtggacatcatgaatccggccaccgacaagaagcagggcgtcgaggcgttgcagcgcgcgttgggcgtcactcccgcacagacggcggtgttcggcgattatcttaacgacctgctgatgcttgaggcgggtgactggtcgttcgccatgtccaatggccatccggacctgcgggcggccgcacgttatcttgcgccgtcgaacgccagtcgtggtgtgctcaaggttgttgataggctgattgactgacggatgattgcgcgcggaggcgcgattgcccggtgacggccatgcgattcggtcgtagccgagtgcgggcggtcacatgacggaggggaaggcggtgcgatatgcggcaggaagaggctcttgcgattctgggcaccggcgcgaacgtctttctgaccggtgcgcccggtgccggtaagacctacgtgcttaacgaattcatacgtcaggcgcgtgcggatggcgcctccgtgtcggtcaccgcgtcgaccggcatcgcggccacgcatatcaatggagttaccatccattcatggagtggcataggtcttgccaacgcgctgtccgataaactcgtcaccaccattcgcatgcgacgcaagcgcaagctgcaggcggccgacatcctcatcatcgacgaggtttccatgttgcatgcgtggctgttcgacatggtcgatcaggtgtgccgtatcattcgcaaggattcgcggccgtttggcggactgcaggtggtgctttccggagacttcttccagttgccgccggtgtccgtttccgggcgcgatcatgacctgatcgtgcccagtccggaattcgcggcatctcgtgaacgttatgcgcgtgccgggctcaatcctgagggattcgtcaccgaatcgttggtatggcaggagttgagccctgttgtctgctacctgaccgagcagcatcgtcaagatgacggcaaactgcttggcgtactcaccgacatccgggagggttgcgtcagcgatgaggatcgtgatcttctgttgacccggctgggccgtatgccagagccgaatcaacgggccgtgaatctgtttccggtcaacagacaggccgattcactcaacgacatgcgtctgttcgcgatcagggaggaaccgcacgagtatgtcgccgaatcctccggcccggcaaatctggtggaacggctcaaaaggaacatgctcgcgccggaacatctgttgctcaagaccggagctgccgtgatggcggtgcgtaacgataccgaccgtcagtttgtgaacggctccttgggcacggtgcgtgggtttgcccctgatgccaaaggcggctggccaatcgtcgagttcgagaacggcaatatcgtgaccatgaagccgaactgttggcagatgcaggacggtgataccgtgctcgcctgcgtgaatcaggtgccgttgcgctgcgcgtgggccattacgatccacaagtcgcaggggatgacgctcgaccgtgcggtcatggatctgcggcgcactttcgcgcccggcatggggtatgtggcgttgtcgcgggtggagaatcttgaggggttatatctggcgggcgtgaacgagcgtatgttcctggtctcgccggatgcggtgcggcttgacggcgagctcaggcttggttcggcgaatgccagcgatgcgcttgccagatatggcgcctctgccttcatgccgttgccgtcgagcgatgcggacgacgagttcgcccaggatgccctgttctgattcgctttgtggcccttggtcagcccatcgcctgcaatgagcgggcgagatcggggtcgagctcgacttccgtctcgacgtcttccggatccggatcccagcagctgacgatcacgcaggccaagccgatcagcagccagatgggattgtgctgcaggaacgtgaacccgggaatcgcacgtgtgacgacgagccatgccatcatgccgaccagcgcaaggacattgaacagtttcttccatggcagtgaaatcaacaccacgcacagcagggccatgctcagacccacccatgtattgccttccgacagtacttccggtgcggctgcggcgaatacgaaatagcagatgatgccgatccagccgagtttgttccaaatcgaaatgtgcgcggtaatgtgacgcatgacatgccgtcctctctcaacgtgcgccgctcaatcgtcagtttcctgagattatatacaggccacatgacttatttataactctataaataagatgttttccgagtgttcgtagcggttacgtcgccttgcctgagtaacttggggcgtatgaccaaagcacttcgtatgtctaccatgttcctgcgtaccctgcgcgaggaccctgccgatgccgacgtcgtgtcggacaagctcctgcagcgcgcctgctacctgcgcaaggccgccccgggcatctggacctggctgccgctgggcctgaccgttctgaacaagatcgagaacatcatccgtgaggagatggcctccatcgacgcccaggaggttcatttctccggcctgctgccgcgcgagccgtatgaggccacccaccgttgggaagaatacggcgacaacatcttccgattgaaggaccgtcatgaagccgactatctgctggcgccgacccatgaggaaatgttcaccctgctggtcaaggacctgtattcctcgtacaaggacctgccggtgaccctctaccagatccagaccaagtaccgcgacgaattccgcccgcgtgccggtctgatccgaggccgcgaattcatcatgaaggatgcctactccttcacccttgacaaggaaggcctcgtcaaggcctatatggacgaacgcggtgcctacgaacgcatcttcgaccgccttgacctgaagtatgtgccggtgcatgccatggccggtccgatgggtggcttcgaatcagaggaattcctggctccgatggagatcggcgaggacactttcgcgcagtctccgtccggcaaggcttggaacgtcgaggcgttgaccactccggagccggaagccatcgattgcaccggcaccccggccgccgagaagcgtccgaccccggatgccgccaccatcgacaagatggtcgaattcgccaatgccaaccatccgcgttccgatggtcgtgcgtggcaggcctccgacattctgaagaacgtggtaatcgccgtcatgcatccgcaggacgacaaccatgacgaaccgtggcgcgaactcgtggtcgtaggcgtgcccggcgatcgttcggtcgatatgaagcgtctcgaggctcagttcaccccggccgaaatcgaagaggccaccgaagaggatctgaagaagcatccggaacttgtcaagggctatatcggcccgatggcgctcggtccgcaggcccgtgatggcaagaaggccgaagccgccgaagagaccggcgaagcgctgcgatacttcgtggatgcgcatatcgcccgcggttccgcgtggttcaccggcgccgacgaacatgaggttgactattatgaccttgtctacgggcgtgactttgaggccgatggcaccgtcgaggccgttgaggtgcgtcacggcgatatgagcccggacggttccggcccgttgagcttcgagcgtggcgtggaaatcggacaggtgttccagctgggcctgaaatactccaacgcccttggcttgaaggtgctcgaccagaacggcaagaccgttccggtgtggatgggttcctatggcatcggtgtgtcccgtgtgatggcctgcatcgccgaaacccaccatgacgacaagggtctggcttggccggccgtcatcgccccggcccaggtgcatgtggtcgctaccggcaaggatgcggcagcgttcgaagccgcggaacagctgatcgccgaactcgaggccaagggcatcgaggtcattttcgatgaccgtaagaaggtctcaccgggtgtgaagttcaaggatgccgagctgatcggcgtaccgctgatcgccgtcgccggccgcgacaccgtgaacaatggcaccattgaagtgcgcgatcgcaatggcgagaacgccgaggcggtgccggtcgccgatgcggcgcaggtgattgccgaccgcgtcgcagctctgctccaatagcggcaagcgccacccgttgttttccgaacgggcgcagcgaagccgaggattctacgatattggggatccgaggccttgttgcgtccgttcatcatgacgggcattgtttgtgtggggagatcgaagcacagtccatacacaaccgattgtggatgagtgtggatagtgggtgtcttgtccacccattgtccacgactcgcccggaggtctttcagttatccacattccccattcggcgttgcgtcggcccgtcatcatcggcgatagtggaatcaccgcggaaacgcaaggatgcgggaagtcgtacggcgctcctctctctcatacccctttacctgaccgtatgtgcttccgtaccgattcggtactttccgcggcccacatccgttggcagaaagggccgatcatggcacagcaacaaggcttactcaccatcaccggatatgtcggcgcaaatccggtgccattcaacagggagggcatgcctcatgcaagctcgttccgtctggccagtacccgccactatttcgacaatcgtgcgcagcaatggcgtgacctgccgaccacatggatcacggtgaaagcgtatcggacgttgtcggaaaacatctgtcaatcattcaaaaagggcgagccggtcatagtgaccggtgtgcttgccacggagacgtggaatggcgaaaacggggaatcgcggtcccgcacggtgcttgaagccagcaatgcggggcatgatctcaattatggggtcaccgcattgcgtcgattcgccaaacccaatgcggccaatgccgagtcggcgacgcagacgccggcggcccgatccaatgccggagtgcagatcggcgtcgatccgtacacgaatccgcagggtgcgaccggtacggcggtttcgcaaccggtggaggtattgcctcacgatgaacctgaactacaatcggcggaggtcggcgctgacgtaccgggcgattcttcgggatggccggcgactgacgcgcagccggatgaatatgcgaaggccgccgaatccgtcaaggaagaaggggaattcggcggccaggagttttagcggcctgttcgtctaccagatgcgcacgcgctgttcgggggcaagccacatgccgttgtccgcagtcacgtcgaaagccttgtagaacaggtccacgttgcgtgcgatgccgttcgtgcgacactcggcgggggagtgcgggtcgatctgcagatactgctcggccagttcgtcgcggttcttggtgcgccagatggaggcatagctcaggaagaaacgctgcaagccggtgaagccgtcgatttcaggcgctccggccagagaggactcaatggcctcctcggaaccgtccttttcgcggccggcagcgtcatcaagagcgaatgcgtaggctttcagtgcgatgttcacgccgctcagatcgccgatattctcaccgatggtcagtgcgccgttgacatgcggggctttggacgggtcatcggagtacttctcggcgagctgtgtcggcacgaactcgttgtactggccgatgagtttgcgcgtcaatgcctcgaagttggccttgtcctcttcggtccaccagtcgttgagcttgccgtcgccgtcatactgcgaaccctgatcgtcgaagccatggccgatctcgtgaccgatcaccgcgccgatgccgccgtaattcgcggcgtcctcggcatccgggttgaagaacggcggctgcagaatggcggcagggaatacgatcacgttcatggttggctcgtagtaggcgttcaccgtctgcgggttcatcagccattcgtccttatcgaccgccttgccgaccttggccagttggtagcccgtctcatacaggttggccgcgtgcatgttctcggcgaatcctgcttcctcgcgaacgtccagtgcggtgtagtcgcgccaatggttcgtgtagccgatcttcggcacgaacttggaaagcttctccaacgccttggccttggtctgctcgcccagccaggcggagttggagatggagacgcggtaggcgtcgatgaggttggcgaccagctgttccatgcgccgcttggaggattcggggaagtgacgtttcacatactcacggccgatgtcttcgccgcagacgctgttgacgagcgaaacaccgcgtttccaacggtcgcgctgctgcttctggccggaaagcaccttgccgtagaagtcgaagttggtgtcgtcgaactcatgcggcagttccaacgtggatccgatgatcacatggacgcgggcccacagtttgaggtcatccagatcggcggcggcccagaaggcgttgaggcctttgacgaagctcggttcatgcacgattgtgcgggagaagcatcctgcgaaatcaatcggctgcgtcgcggccgcggtggtggtgttgtacgcctcctgccaggactcgatccaggcatccaggccatagtcggcaagcatggtgctcagctcggcatgaccggtggggttataggtcttctgcgaatcacgggtggcgacattgtcccagtggtacgaggcgattgtcgcctcgacttcaaggaggcgtctggcttgggattcggcctcatcgtcggcttcgacgagtttggcgttggtgagctgcttggccaccatcttgacgtaggcttcgcggatcggtgcgtaatgatcctcgcgatagtaggcctcatccggcaatccgagaccggcctgttcgatgtggatgatgttggtctccggggcgccgggatcgccatagacggcgatgccgaataggtccggtccgccaatcgggttcattgcgcccaatgcgcgcaccagcccggccttgtcggtggcttcgtcgatggcgttgagttggtcggcgatggcggtgagtccggaggcatcgatggcgttcacgtcgaggaagctcctgaacagcgtgcgtgacttgacggccggacagtcatcgtcttcgaggatgtcgtgaatctggttttcggcgtcctcggcaagcttgtcgaaggagccgtaacgggagcggtcgtcggggaggcggtacatgtcgatccacgggccgttgacatagcggaacagatcttgtgccggagcggtcacagcggagaacgatgccggatcgatgccggaagtcaaagtggtactcatggcttcacactatccatatttggtgacaaaacgttgttatgcatgccggtgttccggcttggccgaaccctcgatatcagccgacggcaaaatagacagcttgtcgaatagtgttgatggttagaattagacaagctgtctaagatagtggcggaacgtaaaggaaggaacgaccatgaccgatccgaatatgcatgatccgcaggagcagccggaatatggcgcctacgaccggagccactacgaccggaatcgcgacgaggcgcagacgccgcgctatttcgacaatccttatggaaatccttatatggccggcggcaatcaggggcaggatggctcctggcagccggtgagcccgttcaagctggtggaggaatggctgccgcagcaggcgaagaacgccattcgcggcgtctacggcgtactcggcgtcgtcgccctcatccttggcctggccctgctgatctggcccggtgccaccttgaaggtggcagccatcgcgttgggtgcctatttcgtggtctccggcgtgattcgtatcgtcaccgcggtcgtggaactcggcctgccgggagggtggcgcgtgctggacatcctcatcggcgtgctgctgaccgttggtggcgtgatcgtactgaagaacgccgcgctgtctggtgccacgctcgccgtgctcatcaccatggtggtcggtctcggctggatgatggaaggcgtgatggcgctcgtcgaatcctggcgtatgccaagctccggatgggccgtggtctatgcgctgttgtcgatcgtggccggtttcatcgtgctgttctccccggtgagttccaccgcatggctcatcctcttcggcggttgcgccctgatcgtgcttggcgtcgtcgccatcgtccgtgccttcaccttcggcaagccccgtcgcgggtaacgtcgccgctgtagggcgtgcgaagtagggttggaagcatgattgaactgaaaactccaaaagagatcgaagcgatgaagccggccggtcgttttgtcggcggaatcctgcgcgacctgaaggaattcaccaaagtcggcaccaacctgcttgaaatcgacgaattcgtgcataagcgcatcgtcgaccgcaagggcgccacgtcctgctacgtggactatgccccggatttcggcaccggtccgttcgcccactacatctgcacttccgtgaacgacgccgtgctgcatggcgtgccgttcgactacaacctgaaggatggcgacctcatcagcctggatctcgccatcaacgtggacggctgggtgggtgattccgccatcagcttcgtggtcggcgaccacaaggatccggaggacctgcgcctgatcaagtgcaccgaagaggcgcttgaggccggtatcgccgccgcgcagccgggcaaccgtcttggcgacatctccagcaccgtcggcgacgtggcccgtgagtatggctatccgatcaatctggagttcggcggtcatggcgtggggcacatcatgcatggcgacccccatgtgccgaacgacggtcgtgcgcatcacggctacaagctgcgtccgggtctggtcatcgccatcgagccatggttcctcaagaccaccgatgaaatctatcaggatccgaaggacggttggaccttgaggagcgaggatggttcacgtggcgcgcacagcgagcacaccatcgccatcaccgaaaacggtccggtgatccttaccgttcgcgactagtcgattcgcaatgcaaaacctccctctggcgaagagggaggttttgcatatgcggcggctatttttgagacgtaggtttgtcgcgaaacaagcatgccatatagtgaacactactttgaacggttaaggagcgtgtgagtatggccacagcccatctgagtgtggaatcaaaggacttcaccctgccggtggtcgaggccacggcaggcgcggacggcatcgtggtatccacgttgcgcaacgatggctgggtcacgctcgatccgggcttcctgaccactgcgcagtgcgaatcgaaaatcacctacatcgacggcaagaactcgattctgcgatatcgaggctatcccatcgagcagctgtgcgaaaaatccgatttccttgaagtcgcctggctgctgcgccacggtgagttacccaaccaggaacagtacgaccgattcatctccgacatcaaccaccgtacgatggtaggggaggacttccgcacgttcatgggttccttcccgcgcaccgcgcatcctatgagcgtaatggcatccgccatcaatgcgcttgccaccttctatccggacaccaccgacatcaccgactccgaccagctcgacgaggcggcgaccatcatcatggcgaaggcccgtaccatcgtgagctacatcttccgccgtcgccgtgacgagccgatgctatacccggattattcacgcggctatgtcgatgacttcctgcgcatgtgcttcgccgttccgtacgagccgttcgactccgatccgctgtatgtgcacgcgcttggccgactgctcatcatccatgccgaccatgagcagaactgctccacctcggtggtacgcatcgccggttccgcacacgccaatctgtattccgccgtcgcggccggcatcaatgcgctgtcgggcccattgcacggcggtgcgaacgaggccgtgcttcgccagctcaaggccatccgcgattccggcaagtccgtcaaggaattcgtggaggatgccaaggccaatggtcagcgcatctccggcctcggccatcgtgtgtacaagtcgtacgatccgcgcgcggccatcgccaagacgtatcttcagaagatcatggagcgtgccgataccctgaagctgccggccgatgagcgcgcactgttcgacgtggccaccgagctggaagagatcgcgctgaacgacgaatacttcatcacccgtcacctgtacccgaacgtcgacttctacaccggtctgatctaccgtgcgatcggtttcgatccatccatgttcaccacgctgttcgcgttgggccgcattccgggctggatcgcgcaatatcgcgagatgcttgccgatccgaacaccaagatcggccgtcctcgtcaggtctacaccggctacaccaagcgtgactacaccccgatggacaagcgctgaccaccggaatcgcgccaagactacttgtggtagggctcgccggcgttgattttgtaggcgcggtaaatctgttccaacaggatgacgcgcattagctggtgcgggaaggtcattctggaaaagctcagcagatagtcggcacgttggagaatcgacgggtcgaggccaagcgagccgccgatgatgagctggatgtgactggtgccatgcaatccgaggccgtcgattttggcggccagctcctcactggtgagctgcttgccttcgatggccaaggcgatgacgaacgcatcgtcacggatatacctggcgatgcgttcgccttccttcgccttgatctggcgttccaagccctcgcccgcgtgctccggcgtcttctcatccgccacttccacgatgtcgagcttgcaataccggcccagccgtttcgaatattccgcgatggcgtctcgaagatacttctccttgaccttgccgacggtgataagcgttattttcaattgttgtgaagcttctcgttgagttcgatgccggtcttgcgataccgggcctcaatgcggccggacaccgagttgcggatgaacaggatgttgtccttgccggacagatccgcgcccttgacggtctcgagcggctctcctgcggcgaccttggccttgtcgtagatggtgaccttcgtgccggcggtcacgtacaaaccggcttcgaccacgcagttgtcgcccagggagatgccgatgccggcgttcgcgccgagcagggagtgctcgccgatggaattcttcagcttgccgccgcccgacagggtgcccatgatggaggcgccgccgccgatatcggaaccattgccgaccacaacaccctgagacacgcggccttcgaccatggagacgccgagggtgcctgcgttgaagttcacgaaaccggcatgcatgacggtggtgccctcggacaggtgagcgcccagacgcacgcggtcggcatctccgatgcgtacgccggtcggcacgacatagtcgaccatgcgggggaacttgtcgatggacagtacgttcacatcggccttcggcaggcccggggcggcctggttggcaacgttcatcacgtcgagtctgcgcaaggcgaaatcctcgaccgcaaacggaccgtagttggtccacaccacgttgttaagcgcgccgaagatgccatcgaggttcaggctgttcggctgggccagacgcatgctcagcagatgcaggcgcagataggcgtcggcggcgttctcgatcggctcgtcgagtttggagatggtgaacaccggaatgcgacgcaccccgcgggcatcggtgccctcatgggccagatcgccgaagccgtggttcgggcgggagacttcttcgggagcttcgccgagcttgagctccggataccatacgtccaaggtgttgccggcggcgtccacgctggccaggccccaaccccacgcagtgcgctggtcggtcatttgactctccttcaatgcgaatattgcttgttccgttagcaacattagcgtcaggggatggcgttgggcgccaagattccatgtgtcgggtgtcaccgggcatggcccctgcccggggcggtgcgcgcgggccctcatcggaagaggcggggcgtgacatcggaagaggggagcaaagtacgacgtgttgcgtatactttggcaacgtgagtgactatcagaacaatcgtgagcagcgtgaacgccgccgtcgcaccgtagtgcgtgcggtgggcatcatcattgccgccgcgatgttgctgagtgtggttattcctgctatctacgcaggtctttgacgtcgttaggcccgcatggtccggagcgggtctgcattcccccaagcgagaacaggttcgcggtttcgctgcaagggaagtgcgtgcgggctcgcggaaacaccgaaggattgtgcgagagctgtaagcggctccccgacagatcaagataatcaacgtaaagaaatgtatggtgtacacgatggcagaatttgattattcccaggctattggcgaggcacgcgccaagtatgagtccatttccaaggcgcttgacgtcgatcgccttaccgcccaagccaaggagcttgaggtgcaggcggccgagccgggtctgtgggacgaccctgagaacgcccagaagattaccagcaagctctccgcggtgcagtcgcaactcaagcgtctcgcctccgcgagccagcgcatcgacgatgtggagactctcgtcgagctcggccgcgaggaggaagacgccgacaccctcgaagaggcgaaaaacgagatcgaaggcattcggcacgatctggacgatatggagatccagaccctgctcgacggcgaatacgacgaacgttccgccgtggtgacgattcgatccggcgccggcggcgtcgacgcggccgacttcgcgcagatgctgctgcgcatgtatctgcgttgggccgaacgcaacggatacaaggccaaggtcatggacacctcctatgcggaagaggcgggcatcaagtccgccaccttccaggtggatgctccgtatgcctacggtcgtatgagtgtggagggcggcacccaccgtcttgtgcgcatctccccgttcgacaaccagggccgccgacagaccagcttcgccgccgtggaagtggtgcctctggtcgaggccaccgatcatatcgacgtgccggattccgaaatccgcgtcgacacgtattgctcttccggcccgggcggccagggcgtgaacaccacgtattccgcggtgcgcatcacccacattccgaccggcatcgtcgtgaccatgcaggacgagcgttcgcagattcagaaccgcgccgccgccatggccgtgctgcagtcccgactgctggtgctgcgtcacgaagaggaagccaagaagaagaaggaactcgccggcgacatcaaggccagctggggtgatcagatgcgttcctacgtgctgcacccataccagatggtcaaggatctgcgcaccggctacgaaacctcccagacccaggccgtgttcgacggcgacatcgacgcattcatcgaggccggcatccgttggcgtcatgaacagcgccgtgccgcggccgaagaggcagaagcgtaacgcaaaggggaaccacgatggcgctgatctcgctcgatcacgtaagcaaagtctatccgaagggcacgcgtccggcattggatgatatcaacctctccatcaatcgaggcgatttcgtctttttggtgggcgcatccggctccggcaaaaccacgctgctgagcctgctgcttcgtgaagaggaagccacggatggcgagatccgcgtcgccggcaacgatctgagacggctggccccacgtcaggtcccgttctaccgtcgtaccatcggcttcatcttccaggattacaaactgctgaacaacaagacggtgtgggagaacgtcgccttcgcgttggaggtgatcggcacaagccggtccaccatcaagtcgctggtgccgaaagtgctggagacggtcggtctgaccggtaaagagaacagctatccgcatgagctttccggcggtgaggcccagcgtgtagccatcgcacgcgcctatgtgaaccatccgcagatcctgcttgccgacgagcctaccggcaatctcgacccgactacgtcgctgggcatcatggaggtgctggacgccatcaaccgtaccggcaccaccatcgtgatggccacgcacaacgaagagatcgtcaactccatgcgcaaacgcgtggtcgaactgcataccgggaaaatcgtgcgcgatgaacagcagggatcgtacgattccgcgctgtacttcccggacgccgaagtcgaatccaaatcgcatcaggcgttgggcacgtccgataaggaccagcggtatcgcgcccccaatgccatcgaaaccggttcgcaggtggatgtggaaggcgagacccgcgtcgagaccgcggcgaatgccgtcgacgccatcacacagacgctgagttccggggcaggggacgaaggcatcgcccgactggccaactccgtgcattccggacgtaccggacgatatggcgatgccttcgcctctccggaagacaccatgacctggggcaagggcctcaagcttgacgatattgacgggtctgaagggcaggccgaagccgtgagcgagcctcccgcaccgccgacgtcggtaaaatccgagacgtctgcggaatccgaggtgaccgcaacgaccgagactgccacggcagccgaaacaccgggagagaacgagaccctgaatcctccggcaccgcccgctccatccggcgatgccgcccaagaggcggaagaagtacacaaggaggacgactgatgcgcctgcgcttcattctttccgaaacctggaccagcctgacccgcaacgtgtcgatgatcatctccgtgatgctggtcaccttcatctccttcctgttcatcggtgcttcggccctcatgcaggtgcaggtcaccgaggcgaagggcgagtggtacgacaaggtggaggtcgtggtgtggctctgcccggatggcaccagccaggccgcatcctgtgccgccggcacggcaccgaccgatcaggagatcgtcgatctcgagaacctgatccatcaggaagcaggcaaggtcgtttccaagatcacctatgtgagtcgtgaggacttctacaagaacaccttcctcaagcaataccccacaggtacctatcagggccgtacgttgaccgcctccgatatgcaggcctccctacggctgaaactgagcgatccgaccaagtatcaggtcgtttccgaaatcctcaacgggcgaaccggcgtggaggaagtgcaggatcagcgcaagatcttcgatccggtgttctccgtactgaaccgcgccaccgcggtgaccatggtgcttgcggccgtgatgatagtggtggccatcatgctgaccggcaccacgattcgtatgagcgccgcctcgcgtaagaacgagaccgagatcatgcgattggtcggcgcttccaattggacgattcgattgccgttcgtgctggaaggcgtattcgcctcattcctcggatcgttgcttgcggccggtgcgttgagcggcatcgtgaaggtgttcattaccgattggctgtcgcagaccgtgcagtggatgccgttgattacgcagaaaacggtgtggttggtcgcgcccgctttgattctcggtgcggtcgcgttgtcggtcgtcgcctccagcatttcgctgagaaggtacctcaaggcgtagcggctcccaaggtttttccggcatggtcccaggaagtttcattacttggacttccagctttcttctgtacaatgccgaaagaacggttggtatcggaaaggcttcaatgtcaaggaaaatggttcaacgggcacacgccgtcaccggcatgctgctggcctcggcgatgctgtgcgctacggggatggcggtcatggtggcgcccgcaccgcaggcccgtgcggtgagcgtctccgaatatcagaacaaggttgcggatcatgcgaagctgaaagcccagctttccggcgtaagcagcgatcttgccgatacgattctgcagcttgcggatctcaacgacaatcagattccggccgccgtcgaggccgccgacgccgctcagcaggcggctcagcaggcgcagagcctggccgatgccactgcggagcgacttgaggcggccaagcaggataaggcgactttggaggagcagatcgcgcagaccggcagcgattacgatgatgccaaggccgcggtggcccagttggcacgtcaaagcttccatggttccgacgtgtccgatgtgttggacgtggtgaccaactcgaccacgacggacgaattcgtgaacaagatgcagtccgaagcggcggtgacccgtagcgaaacgaacgcggcgagcgatgccgcgaacgatctgaacacatcgatgaatcgtgaggaacgtctgagcgccatcgaagacaagatcacccagctcaagacccaggccgatgaacaggccgccagcgcccagcaggccgccagcgacgccaatgccaagaaggaggccctgcagcagctgcgtgatgagggtgcggcgaagcgtgaacagctggaggcgcagaaaagccaattgaccacgcagagcgcacgtgaggccgcggacatcgtggccatgaaatcacagatcgattcgtggaacaaccagtacaacagcggcaatagcgccacgccgaatccaggaaacaaccagcagcagtccggcggcaattccagcggcaacacatcgtcgaacaattccggcaccaacaccggtggcaacggtcaatccaccaataccaataccggtggcaacaccaattcgggcagtgccagcggcatggactactccgttcccggcagctgcccatccggttccggatactgctacgggcataacaccggcaatacggtcggcggctccgcctatccggcacggcagtgcacgttgtgggcatacctgcggcgctcccaactcgggcttcccgtcgggtcctatatgggcaacggtgccgagtgggccaataccgcgcgcagccttggctatctggtgaacaataccccgcattatggcgcggtcatggtgttcgcccgtgggcagagcgtcggaggtcactggaccgccgattggcaatatgggcatgtggccgtggtggaacgcgtcaatgcggatggttcggtactgatctccgaaggcggcaccggattctccacgttccccgcatgggagacgatctccaatgcgggagcctatcagtacatccattactgacatatcggtgaatgtcctgtggccaagcgtgccgttcgaatcgtcgggcggcacgctttcgtgatattgtctgttgttgcatcgcatcgcaccatgggaaaccggaaaggaggtccggatggtcaaggaacagggaacgaaaccgatcgcgcagaacaagaaagcgcggcacgattacgccatcgaggacaagtacgaggccggtctggtgttgaccggcaccgaagtgaagtcgcttcgtgaggggcgcgcatcgttggcggaatccttcatcaccatcgatcgccgcggcgagatatggcttgaaggagcgaatattcccgaatatctgaacggtacgtggaacaaccatgcgcccaagcgcaagaggaagcttctgctgcatgccgaacagatcgccaagctcgcacggcaatcggaagccaaggggtacaccatcgtgccgttgagcctgtacttcaaagacggacgggtcaaggcggaaatcgcgctcgcccgaggcaagaaggaattcgacaagcggcaggccctgcgtgaggagcaggacaaacgtgaggcactgcgtgccatgcgctacgccaacaggcaggtccgctgaccacatttcgaacattttgcgcaggatttacgtagctgtagcaatggcctcttatcgtgcctgacatgacccggtttggctgggtcggcttggctgggtctttagagagaggacttgatatggtattcaggaacatgaaggcgtgcgcggcgattgcattgagtgccgcaatggtgctgtcgatggccgcctgcggtacttcagacaaggcggattcttccgcttccggcggctcaagctcgtcttcgagcaccaccggttacgatgtctccggcgtgaagaaggacgacgacatcgccgcaatgctgccggattcggtgacgaaggacggcaagttgtccatcggcatggacacttcttacgctccggcggaattccttgccgaagacggcaagacccccgtcggcttcgatgtggacatcgccaaggcgttggccaacatcttcggcctggaagcggatccggagacctccaacttcgattcgatcattccatccgtcgggtccaagtatgacatcggcatctcctccttcaccatcaccaaggagcgtatggaggccgtcgacttcgtgagcatgttcaaggccggctccacgtgggtcgtcaagaaggacaatccgaataaggtggatacctccagcctgtgcggactcaagatcgcggtgcagaccggcaccacccaggaagaggaagtcaacgaggcccaagagcagtgcaaggccgacggcaagcaggacatccagatcctgtccaacaagctgcagaccgatgtgaccaccaacgtggccaccggcaaggccgacgtgttctatgcggactcgccggtcgccggctacgccatcgcgcagaccgaggatacgctggaggcccttggcgaggatgtcggcgtgaccaaggaggccgtggccatcaagaagggcgattccgacactgccaaggccgtgcaggccgccctgcagaagctcatggatgacggcacctacatgaagatcctcaagcattggggcgtcgaatccggcgccatcgacaaggccgagatcaatccgaccgatctaagctgattcctccgattcccgcctctggcgggggaggaaatactcacgtagcattactgccttatcgtacccatttgggatactggggattcgttgcttcgggaagcgatgaatgttcggtagaagaagagaagacagaagaaagaagaatacgataatggcagtgaaattcaagtccatggcggccctcgcgctgagcgccgccatgctgctctccatagccgcctgcggcaccaccgacagcgccgattccagcgcctcggcgagttcatcaaacaccaccaccggctatgacgtctccggcgtccagaaggatgacgagctggccaagctggtcaccgaaggcaccaccgtcaaggacggtgagctgtcctccggtatggaactttcctacgctccggctgaattctatgccgaagatggcaagaccccggtcggctacgacgtggacatgaccaaggccatcgcccaggtgctgggcctgaaaccgaagatcgtctcttccatgttcgacaccatcatcccgtccatcggaaccaagtacgatctgggcattacctccatgaccatcaccaaggaacgtatggagtccgtggacttcgtcagttattaccgtgccggctccacctgggccgtgcagaagggcaatccgaagaagctcgatgcctccgacatgtgcggcgcgaagatcgccgtgcagaccggcaccacccaggaggatgacgccaacgacatcgccaagggatgcaaggccgacaacaaggccgaggtgctctcctataagcgtcaggccgaagccgccaccgccgtggccacgggcaaggccgatgccttctacgcggattcgccggttgcgggctatgccatttcgcagaccgacggccttgaagctctcggtgacgtggaaggcgtcgccaagcagggcatcgccatcgaaaaaggcaacgaaaagctggatgaagccgtgcagaaagccctgcagaagcttatggatgatggcacgtacatgaagatcctcaagcattggggcgtcgaatccggcgctcttgacaaggccgagatcaatccgaccaatctcgactgattccggcgcaagcggagacaaaaggaagtcagcatcatggcgaagaaacaagtcgacggcgacggcctcgatattccgaatcgcatcaaggcgttgccggtcaggcgcaccggtccgatcgttgcggccgtcatcgtcgcgctgttcgccgcgatgctggcgcaaggcctgattaccaacccgcgtttcgagtggaacgtggtctggaagtatctgttcaacgagaatgtgctggaaggcatcaagtacacgctgttgctgacggtcatctcaatggtcatcgccattgtccttgctgtggttctggccgtgatgcgcaaatccatcaacccagtgcttcgtggcgtgagctggttctatatctggttcttccgtggcacccctgtgtacacacagttggtgttctggggcctgttcgccgtgctgattccgcgtatcggcatcggtattccatttacctccatcgaattctggagcgtcgactcgcagtccgtcatcaccgcattcaacgcggcgtggctcggtttggcgctgaatgaggccgcctatctggccgaaatcgtgcgcgcgggtctggaagccgtcgatccgggccagacggaagccgccaaggctttgggcatgaagcgttctctgatcatgcgccgcatcgtgctaccgcaggccatgcgcatcatcatcccgccgacgggcaacgaattcatcggcatgctcaagaccacgtcgctggtcaatgccgtgccgttcacgttggaattgcagttcgccaccaccgccatcgcgacccgcctgtacaagccgatcccgttgctgatcgtggcctgcatctggtatctggtgatcacctccatcctgatgatcatccagtcccgccttgaaaagcacttcggcaagggcttcgacgcacgccccgccggtgcccgcggcaagcagaccccgcttccgggcaagaccgaaggtgagccgcaggatgacatcaacaagcagaacgaagccacgttcgctggcatgaacgcgtgagggagtggcaatgactgaaacaacgattgatggtgtcgttcctgcagtgaaggccacgcaggtacataaggccttcggcagcctgcacgtgctcaaaggcgttgacatgaccgtaatgccgggaaccgtgaccgtgattctgggtccttccggttccggcaaatccactttcctgcgcctgatcaatcagcttgagacgctgaccggcggcgaaatcgacgtcgacggcgagatgatcggctacaagtatgtcgacaagggcggtcggcaggtgctgcagaccttgaatgacaaggaagtgtccgtgcagcgttccaagctgggcatggtgttccagcggttcaatctgtttccgcatatgaccgcgctcgaaaacgtgatggaggcgccggtccgcgtcaagcacatgggcaagaaggaggcccgcaagctggccattcaggaactggaacgcgtcggcatgggggagcgtcttgaccactatccggcacagctttccggcggtcagcagcagcgtgtggccatcgcccgtgcccttgccatgaagccggagatcatgctgttcgatgagcctacctccgcacttgatccggaattggtgggtgaagtgctcaacgtcatgcggtcgttggccaaagcgggtatgacgatggtggtcgtgacccacgaaatcggcttcgctcgcgaagtcgccgatcaggtcgtattcatggacggcggcgtggtcgtggagcagggcggccctgaaatcatcgacaacccgcgggagccgcgtttcaaggacttcctgcagcacgtgctgtaagacggttcgaaggctcaatcgcaacctcccaaactgccgacgctgacaggctgataagcgtcggcagtttggaaggtttcgcattctgccgacgctgacgggctgtcagtgtcggtggtttgggtgattctccaatctgccgatgctgacggggcggtcagcgtcggcagattggatttttgcgttcatatggcaaaggttcgtgagaacgaggcggttcgtttcgtgcttgacaccatcaaccgataggctaggtatctatgtgtggaatcgtaggatatgcaggaaacgtcaagaccgcgtgcggcaagcccttggaagtatgccttcaaggactgcaacgtttggaataccgcggttatgattcggccggtgtggcgctgaccgcgcccgacatgggccacgtggaagtacgtaagaaggccggtcgtctcgccaatctggtggaagacgtcgaacgcaatccgatgccgctggccaccgtaggcatcggccacacccgttgggccaccaacggcgtgccgaatgacgtcaatgcgcacccgcatacctcccgtgacggtaaggtcgccatcatccataacggcatcatcgaaaacgcctcccaattgcgtctcgacctgcagaccgaaggctaccatttcgcctctgagaccgataccgaagtcgcagccaagctgcttggcaagatcaccgacaaaatcatcgaggaggaaggcgggcctgacctggtcaaggccgtgcgccgtctcgcacggatgcttgaaggtgcgttcaccattctggccaccgactgccgacagccggatatcgtggtcggcgcacgccatgattcgccacttgtggtggggctcggtgaaggagagaacttcctgggttccgatgtggccgcattcgtggcctacaccaagcgagccatggaaatcgatcaggatcaggccgtcatggtctccgccgacaaggtggtcgtctccgatttcatgggcaatatcgtgcctgatccgaagatctacaccgtggattgggatgcttccgccgccgagaagggcggatgggactccttcatggacaaggagatccatgaggacccggccgcagtgcagcgcacgttgctaggtcgtctcgacaaggatggcaacctgaacctcgatgaggtgcgcattgacgaacatgacttcaaggccatcgacaaaatcatcgtcatcgcctgcggtacggcggcttatgccggtatggtggccaagtacgccatcgaacattgggtgcgcatcccggtcgaagtggagctcgcccacgaattccgctatcgtgacccgattcttaccccgcgtacgcttgtggtggccatctcgcagtccggtgagaccatggatacgctgatggcgttgcgtcacgcccgagaacaaggttccaaagtgctggccatctgcaatacgcagggggcatccatcccgcgtgaatccgatgcggtgctctatacgcacgccggtccggaagtggccgtggcctccaccaaggcgttcgtggcgcaaatcaccgcagcgtacgtgcttggcctgtatctggcgcagatcaagggtgcgatgttccgcgacgaaattcagcagacgcttgactccctcaaggacatgccgcgtaagattcagtgggtcctcgacacgcagaccaaggccgtacatgatgcggctgcacaaatggtcgatgcgaagtccttcctgttcctcggccgtcacgtcggctatccggtagccatggaaggcgcgttgaagctcaaggagatcgcctacaccttcaccgaaggctttgcggcaggtgaattgaagcatggaccgatcgcgctggtcgacgagggcgagccggtcgtgttcatcgtgccgccggcacgcggacgcaacgtgctgcacgccaaggtcatttccggcatcgaagaggtcaaggcgcgtggcgcgtatatcatcgccgtggccgaagagaacgatcccgatgtggagcgatacgccgacgtggtgttctggcgtccggcatgcccgacgctgatgagcccgcttgtggatgtggtgccattgcagctgtttgccatggatatggccaaacttaagaactatgacgtggacaagccgcgcaatctcgccaagtccgtcaccgtcgagtagtggcgacgtatggttccgtcggaacccggcagggcctcgcaggaagaggtcgtgttgcgtcaggagcgcagacatagatatgtgattgcggaacctcatattcctttcgaatatgaggttctgtatgaggatgacggcatcatcgtcatcgacaagccgcatttcctcgcgaccacgccgcgcggcatgtggtatcgcgaaacggcgctgatacggttgcgcgagaggtacggcgagccggatatcgtcccggcacatcggctggatcggttgaccgccggtgtcgtcgtattcgtacgcaaaccggaattacgtggtgcctatcagatgctgtttcaggaacataggaccgtcaagacctacgaatgtttggcgcctctcgcccctgtcgtacgaccgcggtacggcaccgtcacgagaatcgatcggaatcagccgttcccgctggtacgcagatcgcatatcgcgaaagaccgaggtaggttgcaggcatacgaaataccggcggccgtcaacgcggaaagcctgattgagcgcggcgacaatccgcgcatcatcgatggcaacgtggtgatcaactacgtcttgcatcccaaaaccggcaaaacgcatcagttgcgcgtacatatgaattcgctggggctgccgattctcggcgatgatttctatccagatgtcatccagcgaccgtatgacgatttttcacggccattggagctggtggcgcgcaggctggaattcgacgatccggtaacgggagaatcccgcgcgttcgtatccaacgcattgctcggcgacgcgtgaatctcatggtgggcgtgtcttccgttgtggacatggccttttcccgacgcaaacgtgacggtaggatgattttctgcttgacggtcgggtggaacaccggccgagaacacgagagagaagactatgaagcatatttcaggagcggccaaagccgtcatcgacaaatataatggcacggagctgatcatccgcatcattgtcggcctgattgccggcaccatccttgccctgatcatgccgcacatgacatggatcggcgaattcggcaccttgttcgtcaatgccctgaaagccatcgccccgattctggtgtttgtgctcgtggccagcgcactcgcccaaggcgcatccaagcttgatcgccgtttcggcacggtgattttcctgtacctgttcaccacctttctgtccgcggtcatagccgtgcttacttcccgtgcctttccgcagaccctgtcgttaggcaaggcggccaaggccgatgtggtgccgcagggccttgccgaagtggtgcagacgctgttgaccaacatcgtgtccaatccgattcaggccatgatcgatggcaactacatctgcattctcatgtgggcctgcctgttcggcctggccatgaaggccatcgccaccgaaagctccaaggcgttcatggccaacgtggctgacggcgtatcccaggtgattcgttgggtcatcaacctcgctccgttcggcatcatgggccttgtgttcaccaatgtggccgataacggtctcgcagccttcaccaagtacggctcgctgcttcttctgcttgtcggcaccatgctgctcatggtgcttgtattcggaccgctggtcatcttcatctacctgcgccgcaatccgtacccactggtctaccgttgcttcaaggaatccggcgtgaccgcgttcttcacccgttcctccgctgcgaacattccggtcaatatgcagctgtgcgaaaaactcggcctcgataaggacatatattccgtatccattccgctgggcgccaccatcaacatgaatggtgccgccgtgaccatcaccgtcatggccatggccgctgcgaacacgctcggcatccaaatctctctgccggccgccatcctgctgtccgtggtctccgcgcttggcgcatgcggcgcttccggtgtggccggcggttccttgctgctcattccgatggcttgctcgctgttcggcatcaacaacgacatcgccatgcaggtggtgggcgtcggcttcatcatcggcgtcattcaggattccgtggaaacctgcctgaactccgcctccgacgtggaattcgcggctaccgccgaataccactcctggctcaggcagggccgccagttgccggccttcatgtattccaagaaggagcgtcagcggctcggcatcgaagcgtaagcgaatatatgccgatctcccatccggttgtcaggcatgttgcgttgtggtcttaccttacctgaccgaagcgcgttctatgagggtggttgcgacggtccgcctggtgttggcgggcacgaggccaccctcgcattgtctgataatcatgtcgaaggcctgacgtccgatttcggtgaacggcatgcgcatggtggttaatcccagcctcggtaccatgccgaccagtgaatcgtccacgcccatcacgctcacgtcttccggaactcgtttacccgcggcctgtagcccaagaatcgcaccgtaggccatctggtcgtttgcggcatagaccgccgtgcagtcgggctcgttcgctagtgcgaggccggcctgatagccgctgtcggcgttccagtcgcccctatatagcggtggaatggcgattcccgccttccgtatcgtatcctgccagccctgctgacggatgcgcgccgcgcgagagacgaccggtccggcaatatggtagaccgtgcgatgaccgtgctcaagcagatattcgactgcggttttggcgcagccgtagttgtcggcgtcgatggtggggcagtgggcggcgggctcctctgcgatgattaccacaggcagttccttgtccggctcgtaggtgttgaagtcatcgatgtattcctgcagtacgacgatcacgccgtcaacgggcagctgtcgcatccgctcgacggctgactgcagcgtatggccgttgcctttgacgatgcgctgcacggtcaccgcatattcctgtgattgggcagcctcggcaatggcattgaggattcgcgagtcgccataggatgtcatgtcgaacagaacgacgccgatgttctgaaaacggccgtgtttaagcgcacgtgcggcggcgttcggcctgtagccgagttttgccatggcctcttcgacgcgttggcgtgtttccggtttgacggctttgccgccgttggccacgcgggatacggtctgtgcggacacgccggcttccgcggcgatgtcctgcatggatacggatcgtgagcgttccattattgcgttccattgttggtttagatatgttttcgtaatcattataaaggactacagtgcaaatgtgtcatgcgctgatttgccgagtatctctttgatgctagaatgataacgcaaacattttggctgtcgacgctggttcaagcggtgtggacggccttgcatatcgttacgaaggagtgattcatggctcagcgcagagcacatcgttggcccaagccgttgtcgggtcggtcggaacgcatctggtacggaggcgattacaatccggatcagtggcccgaggacgtatgggatgaggatatccgcctgatgaggcaggcgggcgtgaacctggtgtccgtgggcatcttctcctgggcacggatcgagccggaggaaggcgtgtatgacttcggctggcttgaccgcatcatcgacaagctcggcaaagcgggcatcgccgtggatctggcgtccgctaccgcttcgccgccgatgtggctcacccaagcgcatcccgaggtgctgtggaaggacgagcgcggcgatgtgtgccagccgggcgcccgccagcactggagacctaccagccccgtgttccgtgaatacgcgctgagactgtgccgtgcaatggccgaacattacagggacaacccgtatgtggtggcttggcatgtgagcaacgaatacggctgccacaaccggttcgactattccgaggacgccgagcgcgcgttccgacagtggtgcgaggaacgctatggcacgatcgagaaagtgaacgacgcgtggggcaccgcgttctgggcgcagcggatgaacgacttctccgagatcatcccgccgcgtttcatcggcgaaggcaacttcatgaacccgggcaagctgttggacttcaagcggttcagctccgacgcgctcaaggcgttctacatggcggaacgcgatacgctggccgaaatcacgccggatctgccgctgaccaccaatttcatggtctccgcgagcggcaccggattggactatgacgattggggtggcgaggtcgacttcgtatccaacgaccactacttcactccgggagaggcgcatctggacgagctggcgttctccgcgtccctagtggacggtatctcgcgcaagaacccgtggttcctgatggagcattccacctcggcggtcaactggcgtccgatcaactaccgcaaggaacccgggcagttggtgcgtgactccctggcgcatgtggcgatgggttcggatgcggtgtgctatttccagtggcggcagtcgaaggcgggcgcggagaagttccattccgcgatgcttccccacgctggtgaggactcgcaggtgttccgtgacgtgtgcgaattgggttccgacctgaacgcgctggcggacaacggactgcttggcaccaggctggcgaaatcccgtgtggccgtggtgtacgactatgagtccgaatgggcaagcgaacacaccgccaccccaacccagaaggtccgtcatgtcgacgagcctctcgcatggttccgtgcgctggcggacaatggtgtgaccgccgacgtcgtgccggtacgttcgaattgggacgagtacgaggtggccgtgctgccgagtgtgtacatcctttcggaggagaccacgcgccgtgtacgcgagtacgtggcgggcggcggcaggctgattgtcacgtattacacgggcctgtccgacgagaaggatcatatctggcttggcggctatccggggtcgattcgtgatgtggtcggcgtgagggtcgaggaattcgctccattgggggacgattggccggggactcccgagtacctcgatcttgacaacggcacgacggcgcatgatttcgccgacgtcatcacgtccgtgggcgagcatgccaccgtgatcgcctcgttcaaggatgatccgtggacgggaatggacggacgtcccgcaatcgtcggcaacgcatatggcgagggatgtacggtgtatgtcggggcccgtctgggccgtgatggcattgccaggagcctgcccatgatgttctcctcgttgggcgtggaggttcccgaagcgagcgagccggggctgttacgtgtcgaacgcgtcgacgaggcgagcggggcgcgcttcgtattcctgttcaatcgcacacatgccgtgattgaagccatgcaggatggccggccggtcatcgcatctcttgccgatgttggcgatggcaaggtgacggtgcggcccaacggcgtaatcgtgctcaggaagtaacacaggccaatcacatatagccgtcggcaggtttgggtttccttaaactttcgacggctacgtgcatctgagcgtcggcagtttggacaaccatccaatctaccgacgctcaagtggcctaggcgtcggcagtttggatgactgcccaatccgccgacgcctaggtggttctgagcgtcggtagattggatggttgcccaaactgccgacggggagcggtcctatgtgtggaattccacggcggcacagctgattgccggcaaggtggacgagatggcgccgtccatgcgacttcgcagatgcggcgtgacttaccggagtcatatcatgttatcgtgaacaatgttgagattgcaacattttgcaacaatcttacgttcatggaaagatgtcataatctttggcaaatctctaccgtaacgcgattgagtacccatcatcctgacgtacactcgaaacgtattgcgaatgaggacatcacaacacaggatgaggggagcgggcgtgaggctgaagctggtgaaacgactggtcgccgtctgctgcgccggcattatggcggcgagcgccgcggcctgcggagccagccaggatacccgtaccgaaatcaccgtatggtcgtgggagcccagcatgaagtcggtgatcgccggttttgaaagggagaaccccgacatccatgtgatttggaagaacaccagcgggtatgacaagctcaacaatgccattcaggatggttacggcactcccgatgtggtgcagctcgagtactatgcgctacggcagtatgcggtgagcagccagttggtcgacattaccgatcgggccgataactatcaggatttcttcacgcctggcacttggtcatcggtgcagctcaacggccgcatctacggactgccgatggattccggcccgatggcgttcttctacaatgaggatgtgttcgagcaggccggagtggacgcttccaagattcgtacgtgggacgattattatgaggcggccaagaagcttaaggaaatcggcgtatacatcacggcggattccggtgatgccagtttctatgatgcgatgatctggctggctggtggccgtccgttttccgcgtccaacgatggcaagaacgtgagtatcaacctgaccgatgattcgggcacgagaagattcaccgaattctggcagaaaatgatcgatgaggggctggtcaacaccagtctgagcacttggtccgacggatggaaggaagccgtgggcaacggcaccgttgcatccatgttctccggagcgtggatgccgtcattgctgatgtcggatttgcccggtaccgcgggcctatggcgtgtatcccagatgccgaccccggatggcaaggccgccacggcggaaaacggcggatcggcgctcgccgtgctgcagcgttctcgtaagcccgaagcgtcctatcggtttatcgaatacgcatgtcatgaagccgatggcatcaagacgcgcgtggatggtggagcgtttccggccgataacgataccctgtccgatgcggaattcctcagcaagaccacggtgaccgatgaccggggcatcgaagtgccgtatttcggcgggcaggaatataacagggtgctttcccaagctgccgagaatgtgacgacgggctaccagtatctgccttttgaagtgtatgcgcgaagcgacttccgctccaccgtgggcaaggcctacaagtgggccacgttgctgcgtcgcgaacaggataggctgaacatcattgccgccggtggtgaaaccgacgcgtccggcatcggcgacgccttgaagaacaccgattcctccgaccggcttaagctgaaaagcggcattgcgctgtggcagaaggatctgaaggagtacggcaacaatcagggctttaccattcagtaggctcagtaggccgagcatgcggccgcatgtatgggaggcggcggatcggtcgctccggtcagggccgatccgtgcttatcgtacgttgcgttcgtagatgtgcagcatgcctttgaagatgagttccggatcgtagatgtcgatcatatcggtgtcatcggcgaacacgcggcttaatccgccggtcgccaccacgcggaagtcctcgtcgatctcacgatggaactgcatgatggtgcgttcgataccgcccaggaagttatagtacaggcccgcctgcatggcgggtttcgtgcttgtggcgagaatcgacttcgggcgcgtgatctccacctcgggcagctgtgcggtcgcatcccataacgccgccgcgccggttcggatgcccgtggtgatgagcccgcagatcaccgacgcgtcggctgtcacatagttgaacgtggtggccgtgccgaaatccgccaccagaatcggtccgccatactcgtaatatgctcccgcgcagtcggcgatgcagtcggcacccatgcttttcggattgtctatgcggatattgatgccggttttgacgcccggacccacgatcatcggatcgatgtcaaggaacttcacgatgctcgcgcggaacgaatgcatgaccttcggcaccacggaggagatgatcacgtcatctacatcccccggcgcgaaaccgctcagtttaaggaattgcgtgatcatcagaccatactcgtcggaggtatggttcgccttcgtggtgatgcggtacgtgcctgcgatcctgccatcgtggatgaatccgagcacgacgttggtgttgccgatgtccactgcgatcaaaagcatgccaaactcctttacgattcctggggaccctgttcgccggccacgtcgacatgcagtccggcaagttccgtgagcatacgttcggccaggttccgtttgctcatcttctgccaatgttcgatatgaggccgctccgggatcgatcccggccgaagcacggtcaccacattcgtgtcggcggcaaaaccggcgcccggcgtgcgcagatcgttcgcgaccagcatgtcgcaatgcttggaagcgagctttttcgtcgcgttgccttcaagatcctgcgtttccatggcgaagccgcacaacgtctgcccgtcgcgtttgttggcgcccgcccaagcgagaatgtcgggattcgacaccagttcaagcgtaatgcgctcgcgtccgtttttcttgattttctcggcggaccgctcggccggacggaagtcgccgacggccgcggccatgatggtgatgtcggcattcgcaaacgcatcctgcacggcccggaacatctcctgggcgctccgcacgttgacgacatcgacgccatgcggcgcctgaagcgaaaccggtccggacaccagcgtcaccttcgcgcccatgtcccgcgcccgttcggcgatggcatagcccatcttgcccgtcgaatgattcgtcagatagcgtaccggatcgagcggttcctgcgtaggaccggcggtgaccagtacgttgcgtcccttcaacggcagcgaattgtccggaagatcgccgtgcaacagatccgccacggccgcttcgatgccggccggctcctccatacgtcccttgccgatgtcgcgacaggcaagcatgccggattccggctccacgatcgtccagccaagttcccggcacgtctgcagattgcgttgcgtcacggcattggcatacatgtgcacgttcatggcggggcatagcaccttcgggccctcgtcataggcgagaatcgtgctcgtcagctgatcgtcggcgatgccgcatgcgattttcgcaatcgaatcggcgctcgccggtgccaccaccaaaatgtcggcccacttcgcgtcatccacatgattgatctgcgtggagtgcatagccgttgcggaaacatcgccgtcagtacgctgggcggcgaacatcgccgtgcgtgtcggcgtatgcgtcagtgacgtgaacgtcaatggggtgacgaactcctgcgcggccgcggtcatcaccacacgcacctcatggccctgcttgctccagtcggaggcgagatggcaggccttgaaggcggcgatgctaccggtgaccccaagaagaatatgcgcagtggtcatggcttcacaggtccttccatagagcgagccgacgacgaggtcaagtatatatcgaagcggatgcggccgcgggtacgccgagcggtagaatcagacagtggtgatcgacccggtatgggcggtcaaccgtgcatcgcaatcacataggagcagacatgtcgcaaccttcaggtgcgcacggcgcaaccggcgcaaccgaaacgaagaccaatgcggcgagcaccgacgcgacgctcaatgcgcgcgtcaaatcgccgaaacccagcggattcaacaagtggatccccatcatcatcgcagccgtcgtcacactcgccgtcatcatcggcatcgcggtggtgcgcaacggcggcaaaaccgacggatccgccaacactgcgaataccgccgataccgtgaccatcgggctcaaactcgcgcccgtcagcctcgacatccgccaccaatccggttccgccatcgagcaggtgctcatcggcaacgtctacgaggcgctgctgtcgcgcgattccgacaatcaggtgcagccggggctcgccaaaagctgggacatttccgaagacggcaagacctataccttccatctcaacaagaacatgagcttctccaacggcgacaagctcgacgccgaagacgtggcatggtccatcaatcagctcaaggagcagcagtactacaacgccaatcaggtggcgagcctcgaaaaagccatagccgtcgacgccgacaccgtgcaactcacgctgtcgagtcccgactccaacctgctatggtacctgaccggccgcccgggtctcgtattcgacaagcaggccaagtatgacgcgaaaaccgaggccatcggctccgggccgtatacggtcgaatccttcgactccagcagcaagatggtgctcaaggccaatccgaagtattggggcaccgcacacaaggccgtcacgcagaacgtgatcctgcggttcctgaccgatgacaatgcggcggtcaacgccctgaaaagcggtgacgtggacgtgctctctccggtcaacgccacgcttgcgaaatcgctggacgccaaaacctacaaggtttccgcggccgacggcagcgacaaatacgtgctcgccttcaattgcaccaacgccaagctttccgacaagcgcgtacggcaggccatccgctacgccatcaaccataaggaaatcatcgcctccagaggagacgtcgactatgcgctcggcggtccgatcccatccgtcgaccccggctacgaggacctgaccgacctgtacccgtacgacctcgacaaggccaagtcccttatggccgaagccggctactccaccgacaagccgcttacgctcacccttacctacgccaatacgtacggcaccgaactcggcgaccagctacgcagccaacttgccgacatcggcatcgaactgaacatcaactatgtggaattctccacatggctgcaggatgtgcacgccaacggcgactacgaactgtcgctggtggaccatgccgaaagtcatgatttctacaagtggaccacgccggactactactaccattacgacaacaaggaagtgcaatcgctgtatgccaaggcgttggccgcgaccgacgatgcctcccgcgacgactacctcagacaggcggcgaagatcgtcagcgaggatgcgccggcggactggctgttcggataccgcgtgagcgtggcctatagcaggaacatctccggatttccggagaaactcagccagacggtactgccgctgtggcggatatccaaggcgcaatagcctctcggccacgagtggcgcatgctggccttccgttcgtgacgctgacacgttgcgatttgaaatggtgaaagagacatatcatgagattcctcggtaagcggcttctgctgtttgtgggggcgttggtagggttatcgctgctggtgtttgcgctgctgcgaatcctgccgggcgatgtggcggccgtggtggccggcaccaatgcgacggcggaacggttgacgtcgctgcgcgcgcagatggggctggataagtcgtatgcggcgcagtatggcgattgggtgctcggtttgctgcacggtgatctcggcacttccgtggtcagcggcaaggcggtgtccgcacaggtgtcctcgcgtgcttccgtcaccttcccgctgatcgtgctgagcctgctgattgcgctggcgatcggactgccactcggatgcgcggcggtgttgacccgcaatgtgcggctgcgcggggtgttccatgcggctgcgatcgtagccggtgcgattccggcgctgtggggcggcttgctgttgattctgctgttctcgaagggcattggactgatgggattgctgccttcgcagggattcccggacgcgggatgggccgctccgctgagcgcgatggccgcgctggttttgccggctttggccacaggcattaccgccggtgcttcgattatgcgttacacgcgtgccgcggtgggggacatggcttcctcccaggcggtcgccatggccatggcgtgcggcatgacacgcaggcaggccgtgttgcgtgtggctttgcgtctggcgattccgcagctggtgtcggtgattggcctgaccttcgcgcagatggtcaccggggtgatggtggtggagaacctgttcgcgcttcctggcctcggttcgatgctggtcaccgacgtcggcaatcgggatctgaccgcggtgcagagcgaactgttcctgctggcggcgtttttcctgtttctgggactgctggtcgacctgctgcatcgcatgctcgatccgcgactgaagaatgcgaccattggttcgggtgaggtgctttcatgaacgatcgtatgcatgccctgcgagtcgtgctgcaatccatgtggaaccgtgcgggcggccgctatgcgcttatcgtgatgggtctgtggctgctggtgtcggcgatttcattggcatggacgccgtattcgctgttggccaccgacggtttcaacatatggggctcgccgtcctctgcgcacctgttgggtaccgatggtgtgggtgcggacgtactgagctggctgatggccggttctcgtacgaatctcatgatcgccgtgcttacggtggcggtctcggccgcgttcggcctgctgctcgtcgccgccatggtgtcgcgtcatggcgcgttctcatcggtttccgtggtcgtcgtggatgcgttgatttcgattccgacggtactcgtcgcactgattctgtccgtaccgttcggcgcgtccgcggtggtgatcgtcgccgcctgcggattcgcgtacgggctgaatctggcgcgaatcctaagaccttccgctctgctggccgcacgttcggcatacgtggaatcggccatatggtcgggagccggcccgattcgcgtgttcttcacgcatattgtgccgaacacgttgccggtactgtcggtgcagctgtcgatgagcgccggaacctcgctgcttgcggaggccggcctgacctatctcggcgtcggcgtcggcgcgggcgtccccagctggggacattcccttgccacatccgtgcggttcatcagcatccacccgttggccgtggtatggccgggcctggtcgtgacgcttgtggtcatagcgttgaatctgttcggcgatgccctgcgtgacgccatcgatccgctggtcaatccggcattgagggaggtcgcatgagcgtaaccatccgcaatctcaccatcgtcatcggcggcaaagcgatcgtcagccatgtcgatctggatatcgccgacggcgagcgcgtcggactgatcggctcgtcgggttccggcaaatccatgattgccaaggccatgatggggctgctgccagccactgcgcaggtgagtggctccatcgaaatgggtggcaggcggatcgtcggcgccaccgacgccgatatcgccgatttgcgtggccgttatgtgggcatggtgttccagaatccggctgcggcgctgaatccggtgatgaccgtggcacagcagatcggccttcccctgtatctgcattacgatctgacggcggcggaacgtgcggagcgcatcagggtcatgcttgccaaggtggggcttgacgaggatgtgttgcgcaagtatccgcatgaactgtccggcggccagcagcaacgcgtcggcatcgcgaccgcgctggtcacctcccctcatctgatcattgcggacgagccgaccacggcgctggattccatcacccagcggcagatcgtcggcttgttgacttcgctggtggacgatgccggagcctccatgctgttcatcacgcatgattttgcggtattgcatcatgcgaccacacgatgctatgtgcttgagcgcggcggcatcgtcgaatcgggggcaacggcggatctactggcttcgccgcataccgggcaggccatacggctggttgaggcggctcgggaactgtcgcttacgacgaaggagtccgatcgtgtctgacatcgtgttgcaggggcgtggcatcgacaggtatttcggttcgggaaagcaccgcaggcaggtgttgttcggtgtcgatatcgatgtctatgcgggtgagtgcctggcggtgatcggcggttccggttccggtaaaaccacgcttacgcgggtgttgctcggactggaatcctcggatggcggcgacatcacctatcagggggttggcatcgttggtggcgcggaacgattgcgccggcagtctggtctggtgttccaggacccgttcggctcccttgacccacgttggcgtattgaacgttccatcgccgagccgttgcgtctgcatcatcccgactggtcgggcgagcgcgtgggcgcccgcgtggccgagtcgttgcgtatggtcgatttggatccgaaggatttcctcaaccgttttcccatggatctttccggcgggcaggcgcaacgtgcggcgatagcgcgcgccatcgtggatcatccgcggattctgcttgccgacgagccgatgagcgccattgatgtggccgcaagaatccgaattcttgattccttccggcgaattcgacaggcggagccggacatggcgttgattatggtctcgcatgatcttggtgtggtacggcatatcgccgaccgcatcatggtactgcatgacggacgggtggaggagagcggcctgaccggtgaggtgctggacgctccgcggcgcgactacacccgtgagctgattcgggcggcctcgctgtaaccggtgcgatttggctggcccgtccgttgcgcgatggtcaacatgagcattgcgtgatcggcatcccgttgtacgaccagatcgccgccgcatagcatccgcatccgttcgcggacgttgctgagatcgatgatcgcctgccggtcgtccttcagacgggtgcatggcgcgtcggacatgacctgtacgtaccagtattgccgttccttccatgagctgaccgtcagatgaaggccgcttttggaagttctgccatagagcagcatgtattcgatgactgtctgcaaggacatgggaggaatccggaacgcttgctcctcgagtcgccaatcgacgtggatggtttccgtcggatcgagttgctccaacttgatgtatgacttgcagaaagtgacctcgtcgatgagcggtacggtctggtcgttgccgaataccgacagattgccacgcagatatgcggagaagtcggcgatgatgcggcgggccttggagggatcctcatcgcatagctcctcaatggcggtcagtgagttgaagatgacatgcggctgcccggcgagtgtgatggttttgctgatggccagatcgatttcgtgctgcagtgcgcgttgcgcgttgcgacgttcgtgcagcacgtacaggagtaccagcgccatcaatgtcccgatgatgagggtgatgacggccagatgccgcaattcgatgacgtacgttgaatccgcggacgcgaatgcccatgcgaatgggtttcgtacgtgtgtcggattcatgttcccccctgatgcccgagtacgcgggttccttctcttgtgcaccatagcggatgaaccgtatcagaagcgtatctgacgaccctgtaaggcggcgtcaagtccaagatgccgtttgtgcggaaacgatggggagaggttggtgggctcatcggtaaggtcattcatgccggtctttgcgaaatcggttaagcgtcgagcgttcacgtgtcgtagctgttgccggtgtggtggtgaccgtgttgcgcagggggtgacacgccgatgtccgagggtgtggtattgtttgagccatgttcaatttctcatgttgttgctgtcgctgaccaaccgcccgaggggcgcgcggttcatcgacgcataacttgagataggacattcttcagcgtctgcatgctgcagacggttgtgaatcgtcagcctttcgttcttccgccggcatgagtgccgcggttggaaaacatgcgcaacgcaacgaatcccataaccatgtacggtgcggacgagcgaagaacatacgacatcacaacgggtcccgtttcaacactgcacgtgacatcgcgagcttctcgaacacaacgaacacgacgcttgaatatcgaaagccccgaaaccacactgcacaaaggaaacgccatgaccatccacgattccctggccgaactcatcggcaacaccccgctcgtcaaactcaaccatgtgaccgacggcatcaaggccaccatcgcggtcaaggtcgaatacttcaatccgggcggttcgtccaaggaccgcatcgccgaacgcatcatcgatgcggccgagcgaagcggcgaactaaagcccggcggggtgatcgtggaaccgacctccggcaacaccggcgtaggtctggctctggtggcgcagcagcgcggttaccgtaccatcttcaccctgcccgacaaggtctccgaagccaagcgcgccgtactgcgcgcctatggggccgaagtggtcgtgacccccaccgacgccggtccggacgacccgcgttcctattatcaggtggccgaacgcctcgccaaggcgattcccggcggctatcgcccgaaccagtacgacaatccgaacggcccggaaagccactaccacaccaccggcccggaaatctggcaggccaccgaccataagatcacgcatttcgtggccggcatcggcaccggcggcaccatctccggcaccggccgatacctgaaggacgtttccgacggagccgtgcaggtcatcggagccgatccggaaggctccatctattccaatcccgacgacgtgcaccagtacaagatcgaaggcgtcggcgaggacttctatcccaaggccttcgaccgtgggctgcctgacgagatcgtgcaggtgaacgatgccgaagccttcgaaatgacccgtcgactcgcaggcgaggaaggcctgttggtcggcggctcgtccggcatggccgtcgtggcagccatcaagtacgcccgcgagcacgatttggatgagcgccagaccgtcgtagtgctattgccggattccggtcgtggatacatggagaagatcttcgacgacgactggatgcgcgccaacggcttcgccgacatcgtggaacgcaccaccaaaccaagcttggccgagcagtacctgtaataccggccatccatcatcatgtcaatcatccgttcaacccagaccatccgctacttccaaggagttcccatcatgaccatctcgaccaacaccgcagccctgaacgccaccgcactcgccacccgtgccatccacgccggacaggaacccgacccgaccaccggagccgtggtcacgccgatctacatgacctccacgttcaagcaggacggcgtcggcgggctacgcggaggctacgattacagccgttccgtcaacccgacccgcaactccttcgacgagcagctcgccgcagtggaaggtgccaggtatgcgctgagcttctcctcgggcctggccgccatcgatgtactgctgcgttccaccatcaggccgggcgacaacattctgctcggcaacgacgtgtacggcggcacctatcgattgctgtccaaggtgtttgtgccgtggggcatcggcctcgatgtggtcgacatcaccgacactgcggccgtctccgccgcgctgggcaagaagcagtacaagtacatctgggtcgaaaccccctccaacccgttgctgaacatcaccgacatcgccgccacctccgcagtggcgcatgcgcacggcaccaaggtggtcgtggacaacacgttcgcctcgccggtattgcagcatccattggccgacggtgccgacgtggtcgtctactccaccaccaagtacatcggcggccactccgacgtggtcggcggcgccgtggtcctcaacgacaaggagacccgagacgaggtggccttcctgcagaacgcagccggtgccgtgccgtccccgttcgactcctggctcgacatccgaggcctgaagacccttgacttgcgtgtcaaacagcacagccgcaatgcgctcaaggtggcgcagtggctcgaaacccgtccggaagtggaacgtgtatggtatccgggtcttgaatcccatccgggacacgagatcgccgcacgtcagatgcacggcggcttcggcggcatgatctccgtgcagatcgcggccggtttcgaagcggccaagaagttcgctggcgccaccgaagtgttcacgttggccgaatccctgggcggtgtggaatcgctgatcgaacatccgggtgccatgacccacgcctccgtggccggtaccacccttgaagtgcctgccaatctggttcgcctgtccgtcgggctcgaagacgccgacgacctgatcgccgacctcgagcaggcgttccgccaaatctgattgctacactaaggggcatgacggcaataacggattcccgggcactggacgcactgaaacaatacttcggctatgaagcgttccgtcccgggcaatccggcatcgtcggctccatcatcgccggacgcgacgtgctcggcgtcatgccgaccggtgcgggcaagtccgtctgctaccagattccagccacaatcctgccgggcgtcgccatcgtcatctcaccgctgatctcgctgatgcgcgatcaggtcgatgccttgaacgacgccggcattccggccgcgttcatcaacaccacgcaaacgccggacgaacagtcgtccgtattcgcacaggcctcggcaggcttcatcaaactgctgtacgtcgctccggaacgtttggaaaccgaacgtttccgcaacttcgcaagccgtacgccaatctcattggtcgccgtcgatgaggcacactgcgtatcccagtggggacaggatttccgctcgtcctacctcggcatcggcgaattcatcgcaaacctgccggcacgtccgaccgtagccgcattcaccgcgaccgcaacggaacgtgtacgtcacgacatcgtctccatgctgggattgcgcgacccggatgtgaccgtcaccggcttcgaccgaccgaacctgtatttcgacgtcatcaagctggaaaccaggcataaagccttctgggtggcaaaatacgttgccgaacatgccgacgaatccggcatcgtctactgcgcgacacgcaaggaaacggaggcgctcgcggcctcgctcaaccatgccgtggcggaattgcgcgcggcggacggtgccgatccgaggcaggcgggtcccatcgcggtcgcctatcatggcggcatgtccccggacgtgcgtgagcgggcgcaacgcgacttcgtgaccgaccgtgtgcctgtggtcgtggccaccaacgcattcggcatgggcatcgacaaatcgaatgtgcgctacgtgatccaccacaacatgcctgaatccattgaagcctactatcaggaggcgggccgtgccggccgtgacggcgaacccagccgctgcacgctgctgtggaacgaatccgacatcgttacgcgtcgtcgactgcttgactctgactatgagaacgaacgactgacgcccgacgagcaagaagtcgtacgtagggccaagcgccgtctgctcgacgccatggtcggatactgccgtaccaccgactgcctgcatatctatatgacccgttatttcggcgagaacgatacggtcggcggcacgtctgacggcaagtgcgcaggtggctgcaccaactgcgagcacaccttcgaaaccgtggacgtcaccgaaacggcacgagccatcagccgatgcgtgcacgatgtgaatcagaacgtcggtatgggcaagatcatcaagattctgcgtggttcgaaagcgcaggatctgagctatctcaatccggagagcatgcctacgttcggtatgctcgaaggtgtttcggaggcgcgcatacgtgatgtgctcagtcagatggcaaccgacggatttctgttcatctcagaaggacgtctgccgatcgtgaaattcggaacgcgcgcggcggagacggtcgcaccgggattccattacgaaatcaagaaaatcgagcgcacaagccccacgaaacgtggaggagcggcacgtggaacgtcttatgaggcaggcgatgagataagctccactgcggttggctcctatattcccgatgatgatgccgaggcgttgttccaaaggctacgcgaactgcgcctcgacatcgcacgcgaaatcggcaaaccgccatacatcgtgttttccgacaggacgttgcgcgacatggcacggatacgcccggtcaccaatgcgcaattcctggccgtcaatggcgtgggcgacaacaagctcagactgtatggcgagcggttcatgaatctgattcgttcgatcaatgccggctgagcgtggcctttccgccggattgcagcgcgttatcggcaaaacgcatgacgcttcggttgactgcgccccatgaaacgacaacagtaggaacgaacatcgcttatgcgggacagtttgcaggaaaggacaacagcaatggcagacgacaagccggtcgtggaaagcttccaattggaccacaccaaggtgaaggcgccgtatgtgcgttacatcgataccgaaaaaggaccgaacggcgacgtggtgtccaactatgacctgcgtttggtgcagccgaacgagaacgccatccccaccggcggattgcacaccatcgaacacaccatcgcggtactgctgcgcgaacgtattccgggctacatcgactgctcgcccttcggatgccgtactggcttccatctgctgacctggggtgaacactccaccgaggatgtggccaaggctctgaaggaggcgctggaattcatcgctttcgaagccacttgggatgatgtgccggccaccaccatcgaaagttgtggcaattatcgcgatcacagcctgttcacggcgaaggaatggtgcagagacattctctccaagggcatcagctctgatccgtttgagcgcaagctggtatgagaaggctatctgccttatagatggcacgtattcgtcgtatatcaggcgaaaagcccgggaaagataccccctaagtggcaatttgccctaggtatctgccatctataaggcagatagctggatgtgtgcggcctgtgcagtgagcatggtatttttgacgctcggaatacgagagaacgaatcagaggtgaacaggtgagcgagaccattcctgaacggcgcttccgccgcgccacgatggctgatcttccgatcatgttggagatttaccggcatgcgcgtgaactcatggccgccaacggtaatcccacgcaatggggcagcacattcccgcgcgaggaagtggttcgtgaggacatcgagatgcagcgtaccatactgctggtcgacaccgttgacggcaaggagcgtgtgctcgcccaattcgccctgtgcctaggcattgatccgacctatgtgaacattgacggtgcctggttggatgacgacccatatgtgaccatccaccgcatcgcctcgtccgggctcggtaaaggtgccgccaaggactgcatcaattgggcccttgaacattacggcaacgtgcgtgcggatacgcacccgaacaacaaggccatgcagcacgtcttcgaatccaatggattcgcgcgctgtggtctgatccagctgctggatcgatccaccgataccacacgtatcgcctatcagcgccacgagtggtgataaaaaaaatgctccccatcggggagcattttttttatttagaacaggcccggttcgttcagcttggaacgcttgcggctatacgcgaagtacacaatcagaccgagtccgaaccacacggcgaaacgcacccaggtttcccagttgaggccgagaatcagcacgaagcagaacacgatggccagaatcggcgtgaacggtacgccgggagccctgaatccacggtgcgcatccggctgggtcttgcgcatccacagaatgcccgccgatacgatgatgaacgcggacagcgtgccgatgttcaccagttcgaacagtacgttgatgttgatgaaaccgccggcgacagccgtcagaatgccgaagaaccaagtacccttgaacggggtgcgatacttcgggtgcacttcgccgaagaacttcgggaacaggccgtcacggctcatggcgtagcagatacgggactggccgtacaactggaccagcatcacggtggtcatgccgagcaacgcgcccaggttcacgatgaatgccagccagttgagacccgtttcgagaatcacgcctgcgaccggtgcgtcgatgaacttcgcgaattccttgtacggtaccacgccggtcatgatgagcgtcatgatgatgtacagcacggtcgacagcgccaacgagatgagaatgccgcgcggcagcgtcttgttcggattgatggtctcctcggcggaggatgacaccgcgtcgaagccgatgaagctgaagaacacaatcgatgcggccggcacgatgccgtatggctgcgtcgaacccggctggaacgtgtagatgccgtaaggggagaacggcttccagttggcggggttcacataccagacggtgcacacgatgaacagtacgatgatggccagtttgatcaacaccatgatgtcattggccttcttcgtctggttgatgccgatcgacagcagccatgtgatgacgagcacgatcacgaagcccggcagattgaagtaggtggtgactcccggcgtggtaccgtaggcggcggtcagctcgaccggcagatgcagtccgaagccttccagcagcttgttgaaataaccggaccagccggcggagacggtggctgcctgcaacgcatattccagaatcagatcccagccgatcacgaaggcgatcagttcgccgaacgcgagatacgcatacgagtaggcggaaccggagaccggtgccatcgcggcgaattccgcatagcacaggccggcaaaaccacagcagatggccgccaacagaaaggagatgcacagtgccgggcctgcggtgagagcgcccttaccggtgagcacgaagatgccggtgccgatgatggcgccgatgcccaacatggtaaggtcaaaagttttcattgttcgcttgagcggggtcgactcggagacgagttgatccacagatttcttgcgaaatagatccatggtcttcttttccctttaaatggattccttatgggctgaaccggacggatttccgggactctggcacgcctcaacgccagaaatcaaatgggtcttcctaacagcatcgaaagacctcgtgtatggagagtgtaaagaccggccgcggacaaaatcgtggaaaccgcgtgaaatgtctcataatccgcgtgtgcgcaacatggcacgtcacacaacggcgtaacaataggagccatgactttgagcgctacacgtgaatggcaattctcatccgaccagggcaaggcgaattatgaggcggcccgtcggcggtatccggcgcaggcgatcgtcgatctggccgcgttgcgtgacaacatgcgccacttggtgagcgtggtcggcggaccgaattcgggtacggccgtgatgggcgtggtcaaagccgacgcctatggccatggcctgattcctgcagccttggctgccttggcgggcggcgcgacttggctcggcaccgcacaatcgcatgaggcgctcttgctgcgcaaggccggtatcggcttggaccgctgccatattctgacatgggtctacaacggcaccgcggtgccgttcgatgagctggttgccaacgatatcgacgtttccgtcggttcgcttggtggtatcgacggcgtggccgaggccgcgcgtcgtctcggcaaaaccgcccgtgtgcatgtgaaggtcgattccggtttcggacgtaacggcttcactccggccggtttcgacgcggcactcgccaagttggtgccgctcgtcaaggagggcgtgttgcatgtcgtcggccagtggagtcatctggctgtcgcggatgcgccggacgtgccggaattcgtagcctccaccgaccgtcagattgagaatttcaaggatttcacccgccgtatggaagcggccggcatcgccccggagattcgtcatcttgccaataccgccgccacgttgagccgtccggaaatccatttcgagctgacccgtccgggcatcggcctgtacggttacgaggcggatccggccatgggcacgcccggtacgtatggtctgaagccggccatgaccttgcaggcgcagctcggcaccgtcaaggatgtcgaggcgggacatggcatctcctatggccgcacctatctgaccccgaccgacacttccacggcgatcgtaccaatcgggtatgcggacggcattcaccgttccgcttccggcttcgatatggaaggtgccaagcatgtggtcaaggctggcggcccggtgcgtgtgatgaccgctgaaggcccgcgtctgtaccgtgtgtccggccgggtatgcatggaccagttcattcttgacctgcatggctccgcggatgcgctcggcatccacgagggagatacggtggaactgttcggtccgggtcgcggcgaggattacgccgagcccaccgccgacgattggggccgtgccgccgacaccatcagctatgagatcttcacctgcctgcgcaatcgcatcccgcgcctgtacgagcatgccacggaggtgctgtccgccgaagatctcgccaaactcgattcgaacagtattctgtaaagtacctgattcgtcggaacgatgggtgccagtcgagcgcctgccggcgggagcggttggccttcaggccgaccggggtgtgctgagcggaggtgcccatgacggttggttacacgtctttcgatgaagaacggtgggccccggaaccgccgaaatccagtacgcgcaccgccttccagcgcgatcgggcccggctgattcactcgtcggcgctccgtaggctcggcgcgaaaagtcaggtgttggtggccggtaccgacgatttcgtacgaacccgactcacgcacacgttggaggttgcgcagattggccgtcagattggcgcctccctcggctgtgatccggatgtggtcgactgcgcctgtctcgcgcacgatctcggccacccgccgttcggacacaacggagagcgtgtgcttgctgaaatcgcggaacatatcggcggtttcgaaggcaatgcgcaaaccttgagattgctcacccggctcgaaccgaaaatactgtttcccgatgggcgccccgccggagtgaatctgacacgtgcggcgcttgacgccaccgtcaaatacccgtggacctacgccgaggccgccgagcatcccaaaggggaacgcagcgcgaaattctgcgtctacccggatgacgggggagtgttcgaatggctcaagcaaggcgctcccaaggctgcgaggccggtcgagtgccaggtcatggacctgtctgacgacatcgcctacagcgtgcatgacgtggaggacgccatcgccaccggatcgttcgatccggacgtactgcacgaaagcagtgtgatcgacgccgtcattgaggattcgcgtagctggtacggccggcagtgggatcccgaccagcttgtggcggcatttcatcgtatgcatcatcgtggcacttttcccggctactttgacggatcgcgccattcgctggcagccctgaagaatatgaccagcgacctgatcggacggttcgcgaactccgtcgaagccgcgacgcgggacgtgtacggcagcgatccgctcacccgctaccatggcaatctcatcatccctgaggaaaccagctacgaaatcgtggcgttgaaaggcatcgccgtgcatttcgtgatggccccgggcgaacgtgaaccgatgcatgatgcggaacgacggattgtcgccgatctggtcgaagtgttcatggctgacgatccgcgcccctccagcgcgctcgaaagcgtgtttctcgacgattggaatgaggccgccgacgacaacgcccgcctgcgcgtcgcaatcgaccaggtcgccagcctcaccgacacctccgcactggcccttcactccttgctttgctgacgggcggacgaacgacaaccccaagcaatcccagttctttcccgcttcctggcgcagcggcggatgcgatgcgcgatcgcggtcttggccgaacggccttgatcgtgccgtgcgttgcatgcgccgcgtagtcataacctgtgggcacgctggtactctggaacgtatgccgggaatgattctgaaggaagatgtcgaaaaagtacgtgccgcagccgatctgtatgacatcgtgtccgcaacggtcacgctcaaaccttccggaaccggcacttacgtaggcctatgtcccttccatgacgagaagaccccgagtttttcggtgcgtcccgcgctcggcgtgtggcattgtttcggctgtggcctcggcggcgacgtgttcggctatgtggagcagcaggaaaacatcgacttccgtgatgcggtggaattgctggccgacaggtaccatatcgagttgcgttacgatcaggcgaacgccaagtccgagcatgccggttcgaagcgtgcccgtctgctcgaagcgaacgaagcggcgcaggagttcttcgtatcgcagttgatgaccagagaggcgcttgccgcccgcaaactgctcgatggccgtaatttcagccaggctgactgccagcgattcggctgcggatacgcgccgcagggttgggacaatctcgtacgccatctggcgggcaagggcttcacgcagaaggagatgctcgatgcgggccttgcacgtcagggtcagcacggcgtctacgattattttcgcgggcgtgtgacctggccgattcgcgattcgacaggccgtacgcttggtttcggcgcgcgcaagctgtatgaggatgacgcgatcaacgcgaagtacatcaatacccccgatacgcagttgtatcgcaagaaccaggtgctgtacggcatcgatatggcaaaatccgcgatcgtgaagaagcgtcaggtggtgatcgtcgaaggctacaccgatgtgatggccatgcatctggccggcatcgataccgccatagccacttgcggtactgcgttcggtgccgaacatgccaagatcgtgcggcgtctgattgccgatgattcgctgggagccgtacagttggtcggacctttgaaggtcgaaggtcaggcattgagctcgcgcatcgtattcactttcgatggcgatgcggccgggcagaaggccgccatccatgcgtttggcttggattcggcgtttttgtcgcagaccttcgtggccgtggccgatgacaacctcgatccatgcgacctgcgcatcaaacggggcaatgaggcggtgcgttctctgattgagcaggcgaaaccgctgtatgactttgtgatcgaggcggcgatcggccggttcgacaccacctatacgaccggtcagatgggggcggtcaaggcggtcgcgccgctgattgcgcagattcgggatcgttcgctgttggacctgtacacccgcaaggcggttcgtcgtatcggcatcgatctggacatcatgcaacgtgaagtgcgcgatgcccgtcgtaagctcaacgtacgcgatgacgatgcctacgcgccgaaacgacgctacgtcggtggcaacgccgtggaacagcgcgtggaacaaggtgccaacccgtatgcgaatcgctccgtgcggaaggccttggagcatcgtgacgccaccgagcagacctactaccgtatcgatgatgccgtgttcatctgcgaacagcagttcatggccacgctgattcaggtgccgcgtgccgtggagccgagcatgttcgcagggctcacattgtcgaacttcattacgccggtgttccgttcgttgttccaggccgtggccgcggcaggtggcttgccgagcgaggatacgccgcaaggtctgtggatgcataatctgaccaaggccggcgggccgatgctcgaatcggtaatcaacgagctggcggtcatgccattgccgctgccgccgagcgaagacgacatgaacatgggccggacgtcgcgggagcaggaaggtgccgtgcagctgcgcaaaccgacggatgccgaacggcgttatgcctccgagctgctggcccgcctgctagacatgggtcttatgcgtaagatcggtgcggccaagcgtcgtatggcgcagttgccggatggcggtgagaagatcgagttgctcggtcaggtcacgaacatggaggccctgcgcaaggatctgcaggcgaaggtgtacggcaacaacatcgcctgacgaaggttcgccgaatgatccacccacttaggtaggagcccgtcatgggcgtcttcgtgcatgtcgacgtgtcgtttggcgaacggaaggtgacgaaagcgaaccggtgctgaacgctatccgaacaatagacgaaatccttgttgaagactttatcaataacaggtccatggcaatgcttttgggtgttttgccggtttgcaatggcataaggcagtaaggcggagtggtcgaaaaacgttggaatggtcggaatttcagcacgccgaggccttatgataggcggagtttcgggtaaagtgggtacggcatttgatgaacatagctcactgttgcagacgatgttgcaggtgaggattcctggaggaatggatgcgacgtttggtggtcaaggtcctgaagaacgagaccattctcgtagtggcttccatactcgccgtgatctcgtgcttcatcgttccgccggataaggagtatgccggctatattcatgccagcaccatctcgcagctcatctgcctgatgttggtggtgtgcgggttccaacgcatcggtgtgttccgtatcatcggctcgcgtctgctgcatcatgtcagcaccgcacgcggtctggtgatcacgctgatttcgctcacctatttctccggcatgctgatcaccaacgacgtggcattggtcacgttcatcccattcgcgttggccgtgctcaccatggctcatatggaggagcatgcggtgctcgtcggcacgctgatgacggtcggtgcgaacgtcggcagcatgctcaccccgatcggcaatgcgcacaacctgtatctgaaggcgcttaccggcatgccatcatctgaaatgatcggcatcatggcaccatattcggcgaccgcggcggtgctactggtactcatcacttgcgtggtattcggcaagaagccggtttccgaattctcttcgatcgacggtgtcggcatcgaacagaacgtgctcgctcctcgcgccgaccagccgcagccggatgagatccgcgtgaccggctatggtgccggttatggcggctggcgcacgctgatatattgtgcgctgttcgtggtctgcctgctcgcggtgagtgatttcattccgctgtgggtcatgtgcgtgatcgtggtggcggcctttctgctgtgcgatcgccgcgtattccgcaatgtcgattggggactgccgcttacgttctgcatgttcttcatcttcatcggcaacatgaagcgtgtgccggaattctatgagctggcggcctcgctggtgggcgcgcacccgctggaggtgtccgtagtctccagccagttcatctccaacgtgccgaccacgctgttgctctccggcttctgcgaccagtggcgtgagctgatcatcggcaccaatctgggtggcatgggtacgctgatcgcatccatggcctcgctgatcggctacaagaatgtggtgcgcaagtatccgaacaagaagggccgctatctggccgtctactccgcggtgaacgtgctgtttctcatcgtgctcgtaggattgagctggattatcgagccgtgagccggttgcgactgggcgattcgatggattgtccgcggtgtcggacatatcgtcgaattcaagggcgtcatcgtttgctgatggtgacgaagttcccttgtctctgcatgttccatccgcgggaatcggcatggttttgcgcaagaaagccaagggcgaagccaaaggtgttgagcaggatgtcatcaacgtcgaaaatacccagatgcaagatgctttggatgagttcgcaaatcgtaatgaatgcgaggaaaagcaggattgtgactttgggggactgacacttccatgccagcataaagcctattggcatgaatgcaagcatgttgaacagaactgtgagaggtgcttgaaggagttcttggacaatcaataatgggttaacattaaagccggatattcctctacttttaagcattattattgcaaaaattaataaaagatatagtgcagtgatgaaatatagcaatagaacatgaattttacctatgcagatttgatatgtaagcagtgccgtgattaatgagcaacaggtaagcaaggcgatgatgcatacgtgggattgcatgaaaggatggagcgatcctggtatggattcaatggtttgccatatttcgatgcaatccacaagcgcaaaacgaaataggaaaaaggatagcacgccaatgcagacggcgacaagcaaagattctctgcgtttcattcgttgactctttcgccgctgtgaatgataaggcattatctgtcgcgcggccggtatgcggtactttcaaatccttatgcgggtaattctacttcggtcgccaatggtgtgacaattaccgtgaattacgggcagactcgtaattatagggcgaactgcggcatagcggtctgtgcggtaaagaggggcgtagggatgtggtcccattgccttgcggggcattcgagtaatgtgcatctgggttttcactgtaaaaacaccgggtgagggagcgtataaacttcgttgcatctcctctgctgccctaatggtatgggttcgcaacgagacatgttatcgatgattgagctcagggatgccggattgcgcttgttgatgaggggaatgtgacggggtggggcagaattgttgatgtgtcaagttggcaaccgcgtgtgaactgactatactgaatcaggtttggccctgtagctcagctggatagagcatgtgacttctaatctcaaggtcgggagttcgagtctccccggggtcacgatcaagtcctcgcccccatacggagcggggacttttccatagttcccccaatctaccgacgctaagatacgcctcaccatcggtagattgggagaacattcaatccaccgacgctgacatgccatctaccgtcggtggattaggatctttcccaatccaccgacgctgacgggttctcagcgtcggtagtttggaaattgcatcctactatagtgacgtgctggaggaagaaggagtcaaggcatgctgcagttgctgttgggtgttttttcgggttccattacgccggtgcaaacagcggtgaacgcgcgtctgggccgttctgtcggttcacccttgcgtgcctcaatggtgtcgttcagtgtggggttgctgtcgatgctggccattgtgttggtgacggggccttatccgttgttgtcggctacggcggcggacggcccatggtggatgtggctcgccggtgtgttcggcgtgacgttcctgaccggcaacgtgttgctattgccgaaattaggtagtttgaggaccgtgatcatgccggtcgcggggcagatcgtcatgggattgctgatcgacgcttttggctggttcggcgcacaacagcgggcgatttcaccgttgcgtgtatgcggcacggttcttgcgatggcgggtttcctgcttgccgtcatgggggccggtctgcagctgggtcatcgagatgcggcggatgatgcaggagtgagacgacatgtcgatccgggagcttcgcacgatgtgcttgcgatggcgctatggagtttggcaggggtatccttcggcatgtgttcggctgttcaaacggccttgctcggcagacttggcgtctcgttgggatctcccgccaaggcttcgttggcctcctttgtcgtcgggctggctgctctgacgattgtggtgggtctggtcgaccatacctacagcctcggcgatgcgctggaaaaaggcaacccatggtggatgtgggtaggcggattactgggggcgactctggtgatgtgcaatgcatatctgtcctcggaaatcggcaccggtatgacggtcatgctcatattgctcgggcaggttggcggagggcttgtggtcgaccgattcggcctgttgggagtacctcgcaaacatgtacgagccgcccaatacatcggggtgattctcgccgcaatgggtattgttctcaaagccttgtgaacaccgtggctatgagtttgcatggtgcaaaccctttcgcgtgtgttcggtcgatgcgacgatgaggggttcccgtaatgatgccaacatcctgtttgattggttgagggggataaataatccagtgggtggatgatgtatcccattcacaaaccctgcagcgggatgattgcgccagtcactggagaaatcgggacgttgagaagccatttgcaggggtgattgttccagtgactggatgatttggtgcattgcgggggcgtccagcgggatgattcatccacaggccggatgatttgggacgctgagaagtctgtgaacggggtgattgttccagtgtctggatgtttcgggactctgagtggcttgcgagcgaggtgattcacccacaagctggaataatttggacgctgagccatccgagatcgtcggcgcatggccaaggatggcggcattgcacgtgcccttcgcgacggcgattgcgattgttgagacgggggcggtgtgtatgttgttgataggttagtcggcctgtgggagggattatgaaacgaatcgtcaccggcattctggcacatgtggatgcgggtaagaccacattgtcggaggcgttgctctatgccaccggtcaggtgcgcaggcttggccgtgtggatcatggcgatgcgtttctcgacacgaatgcaatggagcgtcagcgcggcatcaccatcttcaccgaaccggccatcatcaaagcggacggtcttacgctgaccctgcttgacactccaggccacgtcgatttctccgccgaaacggaacgcaccctgcgtgtactcgactatgcgattctggtgatctccggcaccgacggcattcagggtcataccgagacgctgtggcgattgctggcacgttaccaggtgcccactttcgtcttcatcaataagatggatgcgcccggtgccgataaggcgacattgttgaaccaactcaagcaacgtttttccgatggctgcatcgactttacgggtttcaccggtgcaggggagcggggcgcagacaatcccgcgtttgcggatgccatggaagcaatcgccatgcaggacgaatccgccatgaacgcctacctcgaagccggaaccgtttcggatgaaaccatccgtaccatgatcgtgcatcgcgagatcttcccttgcttcttcggttcggctctgaaaatggaaggcgtcgaagcattcatgtcaggcttcgaacgatacgttgaagagccttgctacggcaacgaattcggagcgcgtatatataaggtgtcacatgatgcgcaaggcaatcgcctgacttggttgaaagtgacgggcggcgacttcgcggcgaaggcattgctgaccggcacggtgcgggtcggttccgccacggcaggtgacggttcgtgcggtgaagacggtacatggcatgaaaaggccgatcaggtgcgtgtctactccggtgcgaaattcaccacggttgacacggttccggccggtacggtgtgtgcggtgacgggcttgacacggacattccccggcgcaggcctgggctttgaacgcaacggtgagagtccgatactgcagccggtgctcacctacacgctgctgccaggagagtgtgacatccacaaatgcctcgtggcgttgcgcgagttggaggatgaggatccgctactgcatgtcgtgtggcagacgcgtctcgaagaagtgcacttgcagttgatgggtgccgtacagctggagattatccggcagatgatgcacgaccgtttcggattggacgtttcgttcggtccgggcagcattctctacaaggagacgattgccaaaccgattgaaggcgtgggccatttcgaaccgttacgtcactatgcggagacccatgtgctgcttgagccgttgccggccggaagcggcatgcggtatgcgaccgtgtgcagcgaggacgtgcttgaccgtaactggcagagactgattttgcaacattgtcaggaacgtgaacatctgggtgtgcttaccggctcgcctatcaccgatatgaggattacgttgttggtcggccgtgcgcatctgaaacatacggagggcggtgatttccgccaggctacatatcgtgcgatcaggcagggcctgatggaagcgaagaagcagggcgattgccgtctgttggaaccgtggtatggcttccgtctggaagtaccgcaggacatggtcggtcatgccatggccgacgtgcagcggatgggtggcacattcgagactccgagtcccgatggtgagtacatggtattggatggcaccgctccggtggctgaaatgcaggactacgcgatggatgtgaacgcctacacgcatggccgcggacatttaagttgcgtcttcgccggataccgtccctgccataatgccgatgaggtgattgagaatgcggcatacgatccggaagccgatctggaaaacacgccggattcggtgttttgcgcgcatggtgcgggctatccggtcaaatggtacaaggtgccggaattcatgcatctcggctatgcatggagtggcatgggggagtaggaagcatcgtcgggttgtcccgattatcgtcggcgcatgatggggacaacccgacggtagtctgatgcggtgaaaagaaaaacctcagtatcgaatgatgctgaggttttgccgaatgaggtttactggagcggacaacgggactcgaacccgcggtctcaaccttggcaaggttgcgctttaccaactaagctatgtccgcaaagaatttctgccgtgagaagcagaaattcagtgggtgatataggaatcgaacctatgaccccttccgtgtgaaggaagtgcgctagccgctgcgccaatcacccgtggatgtctccaccggcttgccggcttcgtcatccgcttcgcgtgggcgatacaagattcgaacttgtgaccccttccgtgtcagggaagtgcgctacctctgcgccaaccgcccgaagcgagtgctaacttacgtggataatccacgaaatgcaaatcatcggcgtgtcgtagggtgtgcggcgaaacgtcagctctgtgcggtcaccgctggaaactccgtggtctcgggaacctcgcgatccatggtggcggtggcctcgctcatggccacacgaatgcttttcgcggtcgccatcgcggcaattttggagggaagcgtggcatggctgctggtattcagcgtgtcggctgaggcaggggcgtactgcgggagggtggcggattcggtcgcagcaccgatcgtatcgcctatgccgggctcggcggcctccactggcctggtcggcgagccggaaggcatgcccgccttgaccacggcgatggccgcggtgacctcgccaggtccttcggcggcgcgatcggcctgctcggtggtggcatgcgtgagttttaatcgcatctgatgccagaccacattgccatgggtggatgaggaaacgccctcatccacgaatcccaagcgggcgtagaatccaatcagacgttccttgcaggtgagcacgatgccgttacgtccggcgagcaccgaatccaatatcacgcgacgcaacagatagctggcgcaaccacgatgctgatacacgggagccgtatccacgccgaagatcatctgccatgccccgttctcgtcatgcatggaggcgtcatcatacatggcgtcgctgagatccggttcgtcggtggtcatgccgttgacgaagcctacgagcgtgccatcctgaacggaagcggggaagcaggcgtcatcgtcgctttcggtgttgaccaacagccagaaatggtcggggtacgcggcgacgcgagcggtgaggctttcgttgcttgccgcctccgcaggagggaagcacgcggcttcgaccgccacaatcgcgtcaaggtcatccatggttgcatgtcgaatgagcatgtgcctactctctcgcgaggtgtacccaatcttcacattcggtcatcggcttacagcagaaacgcatgctgtgcgatactgtgaaaggattgccgggaggccggttcgcgggttcctgataagtccctatatgaaaatccgataacgccatggcctgttgccggtccgttccgcgctacgatgggccgcgcctgtcaaacaggtcgtacgacagtgcgcatcggatatggacacgcgaatagcgatgagaggcgaggaggtgacacgtgctcgactggacgtttatcacgcattatgcgccgttttttgtcacaggctctgaaatgacgctgttcatctcggtgttcggcatcgccctcgcgattgccgtcggtctggtctgcgcgggcgttgaaatcgcacgtatccccgtcctgcggcagatcgtgcgcgtttacatcgaactgagccgcaacaccccgttgctggtgcagctgtactttctgtacttcggtctgccgaagctcggcgtggtttggtcggccgaacaatgcgccatcgtgggactcggttttctcggcggctcctacatggccgaggcgatgcgcggcggacttgagaccatacccaacgtacaacgcgaatccgcctacgtactgggattcaatacatggcagaccctgagccgtgtggttattccgcaggccgtcagcacgtccattcccggcgtggtggccaatgtgatctttctgatcaaggagtcttccgtggtttccgccatcgcgctcgccgacgtgatgtatatggccaaggatctgatcggcatgtattacagcacgtatgagtcgctgttcatgttggtggtcgcatacttgattattctgctgccgatttcgctgttcggcacatggctggagcggaggttcgactatgaacggcgctgagattctgctccagccgggcgtctttccacgcttgctgcagggactgtgggtcacggtgtggattgccggcgtgtccgtcgtgctttccgttccggtcggactgatcgtcggttggctgatgacgatgaacaatcccgtcatccgattgctgacccgcatctatcttgatttcattcgcatcatgccgcagctggcattgctgttcattgcgttctacggttttgcccgcgcctggaactggaacctggatgcgaccggtgcctgcgtgttcgtattcgtgctgtggggcggcgccgagctgggcgatcttgtgcgtggtgcgctcgaatcgattcccgacgcgcaatatgagtccgcttacgtactgggacttggtccctggcagaccttcacccgggtgattctgccgcaggcgttgcgcaggcttcttccggcttcggtgaatctcgccaccagaatcgtcaagaccacttcgctggcagtactgctcggtgtggtcgaggtgatcaaggtgggccagcagatcatcgatgcgaaccgttttcaatacccgaccggaaccttgtggatttacggggtgatcttcttcatgtacttcatcgtgtgctggccgctgtccatcgtggcccgccgactggaaaagaggtggtcgcatgactgacatgcagcagccaagccttcaggtcgcgcatctggtcaagcagtacgccaacgccgacaggccggtgctgaacgatatttccttcgaggtaccgcacggcaaggtgttcgtgatcgtcggaccttccggttccggcaaatcgacgctgttgcgcaccatcgcgggactcgagccgatccagggcggtaccatatcgctcaatggcgaggtcatcgaaaccggcaggtcgggcaccgaatccgcaggtcgcagcaagcgcagcagtgagttgcgcacgcgtgtcggcatggtgtttcaaagctatgacctgtttccgaacaaaaccgtactcggcaacatcacgcttgcgccgaccctcgtgcagaagcgtgacaaggccgaggtcgaagaggaggccgtcgcgctgctggaacgtgttggactggctgatcgcaaggatgcctggccacatgagctttccggcggtcagcgtcagcgtgtggccatctgccgagcgttgattctgcatccggaagtgctgctgttcgacgaggtcaccgccgcgcttgacccggaaatggtgcgtgaggtgctcgacgtgatgctcgaactcgccgatcgcggccagaccatgctcatcgtcacgcatgagatgcagttcgcgcgggctatcgccgaccaggtcatcctgcttgaagacggtggcatcgtggagcagtccgatgatgccgagagattcttcacccacccgcagaccgaacgtgcgcagcagttcctgcacaccttcgaattcgacaggcatcgcacatcaggcgatgccgtcgaccaatagattgtgatggcagtcatcttgaagagaggagaaaccatgaccgcatcaatcatcagcaaaaccgtaaagaacatcgtggccgcatcggccgcgttgatcatggcggcctccgtggctgcatgcggcccgtccgcagcgaccccgagtgacgagggttccactgcgagcggctccagctcgagcaagaccaccgcccgtaccctggacgaaatcaaaaagtccggtgagctcaaggtggccgtgttctccgacaaggccccgttcggctatgtcgacaaggacggcaactacgccggctacgacgtgtacttcgccgagcgtctcgccaaggatctgggcgtgaaggcggcctacacctccgtcgatcccgccgcccgtgtggacgtgctcacctccaacaaggtcgacgtcaccctcgccaacttcactgtgaccgacgaacgcaaggagaaggtcgacttcgccaagccgtacatgaaggtcgcgctcggcgtcatttccccggaaggcgctgaaatcaccgatgtaagccagctcaagggcaagaccctgatcgtggccaagggcaccaccgcggaaacctacttcgagaagaacgagcccgacatcaagctgcagaagtatgaccagtacgccgatgcctataatgcgctgctcgatggtcgtggcgacgcattctccaccgataacaccgaggtgcttgcctgggccaagtccaacaagggcttcaaggtcggcatcaccaagctcggcgacgaagataccatcgctccggccgtgcagaagggcaacaaggagttgctcgactggatcaacgaggagatcgacaagctcggtgacgagaacttcttccacaaggattacgaggagactctgaagccggtgtacggttccgacgtcgacccggacgacatcgtcgtggaaaagggcgtcgtcgactgacgctggcgtctcctcgtcgtcaggtggcgtttgcccagcctgattgagaccggtaaccggtccggccgcgcatgacaagccgtaatggcgatgtgatggaccgggatgccggaaatggcgtaatgaggctccgaccgtacatggtcggggcctcatcgcatatccggaatccgcatgtttgcgtacggggtcttccttggtcggactgcttccgtgccgtatggaaggttttcattcgcaaggcagtttgtcggaccgttctttaaggtgaattttttcggttccggcttcgatggccgtttcgtagtaccagcatttatggttgatgaaatccaatgtttcctgcaactcggatatttgagattcgaccgcgcgttttctttccaaaaacatttcatggcgttcttttaaggagtcgtcgcccataagcacccatttggagaattggcggatgtctttgatggacatgcccgtttttttcaggcattcgatcactttcagcatggcgatgtccgtatcggagaagacgcggtagccggattccttgcgttccatgaagggaagcagcccttgcttgtcgtagtaccgcagcgtggtcggagtcacgttcatgatttcggcggcttgcttgattgtgtaaggcatgtgaagacctcctgaaccctcgttgaccttaaccttaaggttaaggttacgatgatgttgagcgaaagtcaaaaagcgtcgttcgacgcattgatgcaggagaaattacttatgagcgaatccaaggtagtggtcattacgggcgcatccagtggaatcggagaagcgaccgcgcgtcttcttgccaaacagggcaacgcagtggttctcggagcgcggcgtgagggaaaactgaagaaagtcgtatcggagatcgtgtctgatggcgggactgcggtctactgtgtggcggacgcgtcaaaagtgagcaatcaggaggcgttggcgcgtaaagccatcgaaacctacggaagaattgacgtttgggtgaacaacgcaggtctcatgccgttgtctctgctgtctgaggacaaagtggaggattgggatagatgcgtggatgtgaatcttaagggtgttctgtacggcatacacgcctgcctgggaatcatgcgtgctcaaaggagtgggcacatcgtcaatatcggctccctttcctcccatcagacgggtttgacatgtggagtctacgcggccacgaagtttggagtccgggccattagcgaaacgcttcgcgaggaagaggcggccgcagggtcggggatccgtgtgaccatgttggcgcccggaatgatcgcaacggaattgccgcaatcgttgaccacgcaggaaggtcgtgacggtatgcaggccgcgtatgacgcgcttgcgattccggcggagtccgtggcacaaagcgttgcgttcgcagtaaacatgcctgaaaacaccgccatcaacgagatcatcattcgtccgacggcacagcggttgtgatctgcatgccgtcattcctccgattccgatgattgtgaacacggaggttttgccgcggacggcaagtgcgttgcggttatgtgaagcgattccaatgcaagagaaaataacggggaattccatgaagacgaaaatctttgtatgcgttgcgttgacattgtcatttgcacttgccggatgcggtgcgtccgatactgcgaatcaaagcggtccggccgccgtatcggaagaaaaaaacgttacggaagaaaacaaaccgtcaactgaaagtgaaagtgggacgcaggaagactctcgtgccgaaactgccgttgccatgaaaaatatcacattgagtaccgtgcctgatgggtattacggtgaagccgctcagcaaggcacattggaatcttttgcgtatgacaccaaagactatatcggcgatggtgcggccattcgacgtcaggcgacggtatatctgccgtatggatatgatcaaaacgacaatggaaccaaatacaacattctgtaccttcagcatggggcatacggagacgagcgcacatggatgtacgaatacggtgacggcttcaacaacatgatcgatcatatgatcgaggacggattgattcctccgctaatcatcgtcatgccatatctgacttccggcaacgagtggtatcacgatacaacgccgattttctattccggtgaattgaaaaatgatttgatgcctgccttggaaagtcattatcacacctttgcggccgatgtgacggatacgggatttgagcagtcgcgcacccatcgtgcgttcggagggttttccgctggcggaacgaccacatggcgggtgttccttgagggaatggaccgttttgagtatttcatgcccatgagcggcggtttggctctcggcggggacggctcgacggatatggctgatgccaccactcttgcgaatgccgcggcggcctccggatacggcaggcgtgaatactatgtattcgcggcgactggtacgcgcgatctcgcatatcgaggcttgagtgcgcaaatcgagtgcatgaaaacattgacgaacgcattcgacttcactcagagcggatttgcggaaggcaatctgatgtattacaccgttgaaggcaacaggcacgattaccagtacacctatgaatatgttttcaatggtttgcaatgcctgttttcatggtatacctgaaaatgatggatagaggggattgaatccgctcggtcttgttcaaaaagcgtggacaggtcgcgtgggtgaagtccctgttgtttttatacggttccgcggttttgcgcaacgttgcgggaaccgtgataacgcttcataatcaacgtctattgcgatttgcgccttccataagaagtgcgtatagccacgccggtatccggcttgattattttcgatatcttgtgattgtccgcttggaaagacggtgaaaaagcacttataagagaggggatcggggcatgaagtacgcagtgatcggtgccggaggaatgggcattcagtatggtgttctgttgcaggagttcgcccataaggatgttgatttcatcgatacgtggaagccgaacgtcgagaagattcgcgaacagggcggcgcctatgtgtcgcaggatggcgaagaccgccatctggtgccgatcgacgtctactatccggaggaatacgccggcgagccggacgtgtggatcgtattcgtcaagcagatgcagctcgacgccgtgctcaagcgctgcgcccacctgttcaacgaccgccagatcgtgttctccgcgatgaacgggtacggccatttcgaaaaactcaacgaatacttctccaaagaccgtatctacggcggtacggcactgatcggcgcctacgtatatggtccgggcgacttcaacttcaccggtggcgcccatgccaaggccatgaacctgtgctcctacgccgacgatccgagcgagggggtgaaggcggccgaacaggtgctgttcgaggatttcacggcagccacgctgaacccgactatcgtggagaacttcatcggcatgtgcatggccaagatcgtgttcaatgccgtgctcaacacgctgtgcaccatgtatcagattcgcttcggcgaatttcatgcgcatcccgacgcgcgctggctcaccgaacagctcgtggacgaggcctacggcgcggccgaggcggcgggatacgaactgctcggcacacgtgagacggaggtcgagaccattctgcacaccgccggagtggctcatccgctgcactacccgtccatgtatcaggatctgaccaagggacgtcccacggaagtcgactacatcaacggatacatcgccaaggtgggccgcgaaaacggctacgtatgcaagttgcacgaattcctcacccgagaggtgcatcttgcggaacgtgccttcgccatccacaatccggatatcgtagcccaggccgaagccgacgccgaggcaagcaagtgaccgtataagtaaccatatatcttcgttttttctgacacacatacgagagaggaaacccatgaccatcaacatcctgaagaaagcgaacgacgtcaagcgcgtgttcgcagccgtactcgccgtcacgacgctcgtctccgtcgccgcctgcggctccgacagcacctcggccagcctcgactccaatagcggcaagaccaccaaaatcaccgtgggcgtgtgccccggaccatatggtgacatggtcgaaaaggtcatcggcccgctcctcaaagacgacggcttcgaactcaagaccaagctgttcaacgattacgtgcagcccgacaaggcgctcgcctccggctccattcaggccaacctgatgcagcacatcaactatctgaacaaattcacgaaggacaacaacctcgatctgacctcgctgggccaggtaccgacgctgggcctgggcatctactccaagaagtaccagtccatcgacgatatcgaagacggctccaccgtgtccattgcggccgatggctccaatctggcacgctcgcttggagtgcttgaacagcagggcctcgtgaccctcaagggagacatcgactccaccaaggcttccgtcaacgacatcgcttcgaatccgaagaacctcaagatcaagacccttgacgcggcccagctggcccgttccgtcgatacggtcgatgtggcgctcgttccgggcaatttcgcctgggctgcgggactcaagccagccgaggcgcttgccacggaacagcaggacgaaggcgtaatcaatgtgttcgtggtcaacaccaaggacgtcgactccgacttcggtaaggccgtcaagaagttgctgaccagccaggaattcaaggacgccatcgccaagagcgatttcaaggatttcggcaagccgaccacttggtgaaccgtcgactggcctgatcggtgggtttcccgtgcgagatgtgttgagcgggaaagcccaccgattcgtcaatcgagttaccgagccaatcgaaacaacgaggaaacaatgatcgtcatcgaactgaaggatgtatccgtcaccttccatgaaggcggccgaaccgtcgaagctgtcaaacatgtgactttgaacgtcgacaaaggcgagatcttcggcatcgtcggtttctccggcgccggcaaatccacgctggtacgtaccatcaacctgctggaacgccccaccggcggacaagtcgtcattgacggcaatgacatcaccgggctgagaggtgcggatctgcgcgggctgcgcaagaaaataggcttcatcttccagggcttcaacctgatcggcaacgtcacggtcggcaagaacatcgaattcgcgcttaaagcgggcggatatccgaagccgcaatggcaggagcgcatccgcgaactgcttacgctcgtcggactggaaaacaagatcgacagctatccgtccagcctttcaggtgggcagaagcaacgtgtatcgattgcccgtgcgcttgccaacgagccggagatcctcctgtgcgatgaggccaccagcgcgctggatcttgaaaccacggaaggcattctggcgctattgcaacgcatcaatcgcgagcttggcatcaccatcggattcatcacgcatcaattggatgtggccaagcagatcttcgaccgcgtggccgtgatggaaaacggtgtggtggtggaacagggcaacaccttcgacgtgttcagtgcgccgaatcatccgaccaccaaggcgctggtggaacgctaccttggcatcgccgtaccgccgcagttggtgccgtcgctaccggtcggcaccatcgtggagctgcgatacaagggcgatgcggcgcttgagccgctcatcagccaggtggcacaggattacggcgtaagcatcaacgtgttgcatgccaacgtggaatacttcggttcgcaggccatcggcattctcatcgtgttggtgggcggagcgggcgagccgctggtacaggcgctgaatcagttgaaaacgcacgtgttcagctaccgggaacttgatcgcggacagctggcgatcgctcctgaagccgccgattccgttgcatccgctcaagctcaggaggcgtgagagatatggaagaaacccttgagatccttcaggaaaatcttgctcaggcgctattggatacggcgtatatggttgtcatttccgccatcatcggcgtggtgctcggcactctgatcgcgctgttgctgtatttgactgaaagccgcctgttcaagccgaatcgtgtggtcaacaccattgtcggattcatcgtcaacgccattcgatcgctaccgttcctgattctcatggtcgtgctcatcccggttgcgcagctcttgctcggcgacccgtacacgccgaccggcggcgcgatctccctgtcgatcgccgcggtgccgttcttcgcccgaatcgcggaaagcgcgttttccgaagtcgatccgggccttttggaggcggccatctccaccggtgccaccaccaggcagatcatctgcgaagcggtgttcccgcaggcgttgccgtcgttcatccgcggcgtggtgctcaccatcatctcgctgatcggctactccgcgatggtcggcaccatcggcgcgggcggcatcggcgacatggccatccagtacggctataaccggtacgaaaccggcgtgctcgtggcgatcgtgatcattctgatcgtcatcgtgcagatcatccaatggatcggcgatgccatcgcacgcaaggtgactcactgagcttgacggtgtcgtaacaaaggttgacggcgtacgtggcaagctgaggctgttttcggtcccggctccacgtacgcggttgctttcagcaaggcaggtgttttcatgacttcatacgtttccccggtcgcgttcactacggtcgcgcagtcgattccgccgaatgtcttcgccgacatggaccgcaaggtcgctgccgccgtcgcgggcggcgccgacgtgatcgatctggcgaaaggcaatccggacgcctttccggcggatttcatccgtgacgtcgccaagcaggccgtcgatgaccccgcgaacgcgcggtattcgccgttcgacggcaaaccgagttttttgcaggcggccgagcattggtatcgcaatacgtacgacgtcgacttggattggaggacgcagttgtttgcggtggagggcgccgtcgatggattggcggcgctgtttgcggtgctggtgtctgagggagacgccgttgcatacgcggatccgtattatccgtcgtaccattgcatgacactgatgagccgcgctgaggagattctgctgccatcgcttgccgagcgcggattccttcccgatctggatgcggtgccgggggagacctgggatcgcgtcaaggtgctgattctgaactatcccaacaatccgaccggtgcgcaggcgccgcgtgagttcctggaacgcgccatcgagctggctcatgagcaccgcttcgtgatcgtacaggatttcgcctatgccggtttgggtgtgcgcaatcagcagatcagcatcctatcgttgccggatgcgttcgatgtgaccgtcgaggtatgctcactctcgaagatgtacgcgatggccggttggagggccggattcatcgccggtaacgacgacatcgtcagccacgtcaaacagtatcactatcagatgggttccatggtgaccggcaacgtgcaggatgccggtaccgtggccttgcagtccgatcaggaatgcgtggctgagttggcttcgcgctatgcgttgcgtcggcagatcgtcgccgacggtctgcgcgatgccggcttggacgtgttcgattcggacggtggcatatacgcttgggtgcatgctccggaagggctgaccggcgagcggttcgccgatctgctgctggaacgtgccgccgtagccgcgctgccgggtacctgtttcggcaaagtcggcgtcgactatgtgcgattcagcctattgaagtcagaggatcaactgcgggaggcggtgcgccgcatagccgccgtgctgtagttggtcgtttcggaactcgaaccattgagaagcggccggcatcatccataccatactgcggttccgcttccggacaaaccatgcaaacgaatgcaatctgctgatatggttgacggttaggcgtcacaatggttgcgacgcttggatctatcaagagaagccagaggaggaagtgacgatatgggctttctatatgctctccttgtcattgcggtgatcatcgccatcctgttcctgtccacgctattcatcgtgccgcagcagcaggcctacatcatcgaacggttcggcaagttcaacaaggtgcagttcgccggcatccatattcgtattccgttcgtcgaccgcatcgccatgaaaaccaacatgcgtgtcaaccaactcaacgtgcaactggaaaccaagacgctcgacaacgtgttcgtcaccgtcgtggcctccacccagttccgtgtgaacccggagaacgtggccactgcttactacgagctgcgcgatccggcgggccagctccgctcctacatggaggatgccttgcgctccgccattccggcgctgacccttgacgatgcgttcgcccgtaaggatgacgtggcctttgacgtgcagaagaccgtcggcaatgaaatggcccgttttggcttcaccgtggtcaagacgctgattacggccatcgatccgagcccacaggtcaagaacgccatggattccatcaacgcggcccagcgcgagaaggaagccacccgtcagcgtgccgaagcccagcgcatccagatcgagacccaagccgccgcagaagccgagaagactcgactgcagggcgaaggccaggccaactaccgtcgtgagatagccaacggcatcgtcgatcagatcaagagcctgcaggccgtcggcatgaacatcaacgacgtgaacaacgtggtgctgttcaaccagtatcttgatgtgatgcgttcgctcagcgagtccgacaacaccaagaccgtggtcttgccggcatcgacgccaggcggctatcaggatctgtatgagcaggtcaccaaggccatgctcaccgccggcgaagcgaagtgatgtgaaggctttcgcctgccactttctgtattgtcacggtaggtgaaacccctcctttcggtggaaaccgcatgaatggtgacggagagtgcggaaaacccgaaaggaggggcttgtcatattcgggtgcactgcatatcagcggtgcacgtttgattggtgggcggaaggatgcgtgtcaggcggcgcttccgaccagttgtcgtaccggcatcatcgtcacggtgtcggtgttgccgacggtttcgagggcattgatgcgggtttgcagatcgatgaccttcttctccagccatttaatggtcatggattgggtgagtaccagcagatcgtgctgatcggagccggatgcattggcgaaatcccgtgcttcgagcatgatttgcggatcggccttccagcgggcgatggcacgttcgatgcgtttgccgccgacgatcttcggatcgaggccggcgctggcgaagatgctggtcgggccattgccccgcagatactgcgccatgcaacgtacctggaagtcgtgcgaataggtgatgcggtcggcggaggcccgctcgaccgcgggcagggtattcagataatacacttcggcctgagtgaaacgacgacgcatgatgatcccctttctaatgatcagcttcggctttcggcgcttctctgaatgtcgaagctgatgatttcattctattttcatgatttgcggggtgaatggcttctggcacgaaacggggtgttcttggcacgaaacgagggggttatcatatcgacgagagatgacgaatatggcgataagccggtgaaatcaggtgggtcagggtgttcccctaggggatgcaaggatgatgaaaaaggtatagactcaaccccagaacctcaaggggaaggcgaagaaggcttgtgaaagggaccgtaccattgcatccgatatcggttgaacgaacaggtgcaacggcatctgccggcaccgttgtcagaccaatcatcgaggtgaggaacctgcgcaaggaatatccggtgcttgacgaaaccgtcgtggcgctggagcgcatcaatctcaatattccacgtggccagatttgctgcatctacggcgaatcgggttccggcaagtcaacattgctcaatcagctggcgggcatggaaaaaccgacgaaaggcggcgtgcgcatcggtggcgtgccgatctcccgcctcgatgaacggcaattggcggaattcaggcagaaacacctcggtttcgtgttccagtcctacaatctgctgccgaatctcaatgccatcgaaaacgtggcgatgccgttgatgttccggggcgtgcccaaacagaagcgcgaagcggtcgccagaaccatgctcaggcgtgtgggccttggcaaacgcatgaggcattatccgacgcagatgtcgggcggtcagcagcagcgcgtcggcatagcgagagccttcgtggcgcgaccggaggtcgtattcgccgacgagccgaccggcaatctcgactccaagaccaaaaccgacgtgatggatatgatctgcgcgttcgcacacgatttcaatcagaccatcgtgctcgtcacgcatgacgacaacatggcgcaatacgccgaccgcatcgtcacgttacttgacgggcgcatcatcgacgaccgacccgtgcatcacggccgaaacagggcatgacgcagacagatacagagaagaaggaccgtttttcatgaccaacaccaatcgcaagactcgattcgtcaacctgctgatcgccacggtggcggcagtggtcatcatgctgacctgcatggtgcctcatgcgttcgccatggccggaggtgcggaatatgaggcggcacgggccgcggccggccaactggccgacaccaatgccgacgcgggcacgggatcggacggcaccgtcaatccggcgaatggaggctctgacggcagcgatggcggaagcgaacagattgccggccccgtgccgaacatcatcatcaccaacttcacctatggcgatggctccgtatcggtcggcagtagcttcaatctcggtttcaccttccaaaacatgggcaaggtggccgtgcagaacatggtcgtgaccgttgacggcggcgaaagcttcgccatcaacggcggcacgaacaccttttacttcgattcgctgtgggcaggctattcgctcacgcagagcgtgccgatgcaggcattgtccagcgcgaagagcggcgcccagggcattaccgtaagcttcaaatacgaatacgtcgataataatgtgcgcagctccaacagttccgacatcaagatttcggtaccggtctcgcagcccgaccgtttccaactgagcgatccggtgctccccgacatcatcaacgccggtgaggaagccaccatcaccatggcatacgtgaacaagggcaagggcgacatttccaatgtcgaggcgtccatcgaaggcgacggcatcaccagcacccaggccacgcagtacatcggcaacgtggcgtccggagcgtccggatccataggcttcgcattcacgccgaacgaggcgacagagaccgaggccaaactgcgcgtgacctacgaggactccgacggacagtcgcagaccaaggaattcccggtaaagttcactgcgcaggaagccgccaagcctgacatcaacgacgggatgacgcctgatgatgggcagaaccagcagggtgttccggcatgggtgtgggcgctcgtcgcccttgccgtcatcgtggcgatcgtgttgaccgtcgtgttggtccgccgtcacaggaagaaggccaagaagcacgatatcgacgaggattgggacgattgggcgtccggtgattccgccggttccgccgcggccgacgaggcgccgacgcagacgattgcacctgccgatcccgcatccgccgattccgccaaggggcaggcatgagattttccgatatcctgcacacctgcagtcagaatctgttccgacgaaagtcgcgcacgattctgacggtgctcggcgtggtcgtcggctgctgttcgatcgtgctcatgatctcgatcggacagggcatcaacgaacggaacgagcagatgctcaaaagcatgggcagcctcaacgtcatcaccgtatacgccggcagcggctcccaaggagggggcggatatgacgatgccgtgaactccgccggttcttcgacggaggcgaagctgaacgacgatgccgtgcagagctttcgcaatattgcgggcgtgagcggcgtgctatcggaaaagaccctgcaatataccactgatgccactgcaggcgtcggcaaccggtatgcggcgcagtatctgtcggtcatgggtgtcaacacgtcgcaattggaggcatccggctacacgctcaaaagcggccgattgccgtcaagaagcggcgaagtgctcgtcggcgaaggcaccgcctacaattttctcgacaaataccggtccggcgcggacatacagcggaccgcaccgggcggctacgtctgcgatgcgagcggcgaatgtcaggaaagcgaaggtgaggagccgttcttcgatgtgctcaccacgaaaataacgctgatcacgggggcgaactatcaaagtccggacgattaccgtaaggtcggcagtgggacttcgggcggatccgacacggacggcaatgccggccagcagactccgaccatctccaacgaatacacgccggtaggcgtaatcaagtcgagcgacaacggttacgatgcgttgagcaacggtgtgatcatgaccatggacgatatgaaggccttgatggccaaggcggccaataccagcgtcacggacgtatcccgcaacttcacttacgatcagattctggtacgggcggaaaacatcaaagatgtgccgagtatcgaagcccagatcaagtcaatggggtaccagacctcgtccttcgagcagacgcgcagggagatcgagaagcagacgcagggcattcagttggcgctgggcggtatcggcggcgtttcgttcctggtggccgccatcggcatcgccaatacgatgatcatgtcggtatcggaacgaacgcgtgaaatcggcatcatgaaggcgcttggctgttatgtgcgtgacattcgcgtgacctttttgtgcgaggccggtgcaatcggtctgatcggtggcgtgattggctgcctgatttccgcttttggttcgctcggcatcaatctggtggcattgcacggattcagttgggagaacgtcatcaaggccatcatgggcggtgacgacgtcagcagaatctccgtgattccgtggtggctgtttgcggccgcaaccgtgttttcgatcgcagtcggcgtgcttgcgggtttcggaccggccaataaggccgtgaagattccggcgctcgacgccatcaaaaacgagcagtaggcactagggacgcgcctgacgaatacggttgacgatacactcggacgtcaggccgtaacgccggttgagatcggcaagcggcacacggtcggtgaactccttgaccgcaccgaaattgaggacatgcacggcgttcgcccgcgaatcggtcgaattggcgtagaaggcggtgatcttctcgccccatccgccctccagttgtccatcctcaagggtcaccacgatccggtggccatccgccaacatggacaacagttcctcatccaacgaggaatactgcggcaccgcaatcagcgtggcggtcaccgggagagccggcagaccgttcgaatcgccatcggcgccgccttccgacaggcggtcgaccacctgggaagccaacgcgacggtgttgccaagtcccagaaccgcgatatcccgccccgcctgaagaatctgatacctgttgaacggacaatcgccggcattgtcgacagccggaatgaccggttcgtggcctgcggcacgtgctatcggatcgaacgccatatccgcggcgcgttccaactcgagaatctgcttgccgggcatgcggatcgccaccacgccatgttcggacgggccggtggcccacgccagcatgtcgagcatctgctcgccgctggtcggcgcaaggcaggtcagatccgggatattcgcgaacatcgtgatatcaaaggcgccggaatgcgtgttgtccgtaccggaaaggccggcgccgaaaatcagcagcgtcaccggaacatggttcagcgacaactcctgctgcagctggtcgaacgtgcgctggaaaaacgtggcggaagtcgccagcaccggtcttccgccggctttggcgatacctgccgcgaacgccgcggcatgttcctcggtgatgccggtatcgatatagtgcacacccgcgcgttcacggaaatcacgggttatgccgttcgacccgggtgtcgcgggggagatgaccaccaatcccggttcgttcgcaaaccgcgattcgagcgagttcgtcgccatggcgccatagtatttacgcgcgtcgagtgccgcgttgagcgcagaatcgggattctgccagtgattcgcctcgcattggccggcatgcggttcggtacctgtctggttgcagccatccgaaccattgttgccatcgccggccgcttcgtcgaatccgagtcccttggtggtatgcacatgcaccacgatcggatggtcgatgtccttgactgtgcgcagcgcctccaccagcgcgtgcacatcgttgccccgctccacatatcggtagtccagaccgaacgctttgaacaggttcaatgcggccgtgccgtccgacttgcgcagcgccgccagcgagccgtacatgccgccgaaatcctcggctatcgacatctcgttgtcattgacgatgatgatgagattgccgccctgttcagccgcgttgttcagtccctcgaaggcgatcgccgagctcaacgcgccgtcgccgatcacggcgatcacattgccgatcgcgctggaaccggaggcactgacctgcatatcgcgggtcttcgcaagaccgcaggccaatgagatggatgtgccggtatgccccagcacgaaggaatcgtgctcgctttcgagcggattcgtgaagccggtcaccgacccgaactgtttcggatcggtataggccgtggcacgcccggtcagcatcttatgcacgtagctttggtgggagacgtcgaagacaagacggtcacgcggtgaatcgaatacgcggtgcagggccaccgtcaattccacgacacccagattcgagccgatatggccaccatggcgcctgccgtattccaacagggtgccacggatttcagcgcacagatcggcaagccgcgaagaggaaagggcatgcacgtcggccggagagtgtatcgaattcaacatgccaacggtcatcttgtccaacgatcctttcccttgccttccaaaggcgaaatcctatcgcaccatatgcccccgcggtgagatttgcgggcaaatgactgcaaagtcttctcaactgcggcacaatggagtctacgaaacgttgcacacagtattcgcaaaggagggccaatgagggccgtatacgctgcaggggtggattacgacgatccgctgtccgtgctggaggtgggcgagcggccggaaccacaaggcaagccgttctggtcgaccatcagcgtgcatgcctccaccgtgaaccaccatgatgtctggagtctgcaaggcgtgggcctgagcgccgatgccacgccgatgatcctcggcaccgacgcggccggcgtgctcgaagaggacattcccgtacgcaaagggctcaaagccggaagcgaagtggtgctctacacgttcatcggcaccgacggcgcaggggtcatgccaggggagcgacgcaccatcctgtccgaaaaatatgcgggaaccatggccgagctgacgcaggtacccagcgcgaacgtgttcgccaaaccgtccaacctgaaccttgacgaagccgctgcgctcggcaccagctggttgaccgcgtattcgctattgttcacctcggcgaacgtaaaacccggggatacgattctgattcaaggtgcgggcggcggcgtgtccaccgcggccatacagctcgcgcatgcggccggtctggaggtgttcgtcacctcccgcagcgaagccaagcgcgccaaggccgtggaactcggtgccgacgcggccttcgaacccgccgcacgactgccacgcaaggttgatgcggtcatcgaatcggtgggcgcggccacatggagccattcggtcagatcggtacgacccggcggcaccatcgccatctgcggcgccaccaccggcgaccagcccggagccgaactgactcgcgtgttcttccaagacatccgcgtgcaaggcaacaccatgggatcgcgagaggacttcgcaagactgctccgcttcgtggaacacgcggacctgcatccggtgatcgactccacgttcgcgctcgccgatgcgcgtcgcgccttcgccaaagtgatcgacggcgatgttttcggaaagatagtgctgcacatctagccgattgcgtaaagtagcaaaggtattcttggctattctctacggaggttttcatggcagacaataagcccgaagtggcggtgatcatgggctcggcgagcgactgggaaaccatgaggcatgcatgcgagatactcgacgagttcgaagtgccgtacatgaagcaggtgatttccgcacaccgcactccggaactcatgggtgagttcgcccatgacgcccgtgccaatggcctgaaggtcatcatcgccggcgccggtggggcggcccacctgccgggcatggtcgcagcccagaccacgttgccggtcatcggcgttccggtgcgttcccacgccctgtccggctgggattcgctgttgtccatcgtgcagatgcctggcggcatcccggtggccaccaccgccgtgggcaactccggtgccaccaatgcgggcctgttggccgtgagcatgctgagcaccaccgacgagcgcttggccgaggctctgcaggaataccgtgattcattgaaggaaaaggtggctgaatccaatgcccagcttgtctgaggaaaccgacggccgtgtcgagcgtctgatgccgggggctaccatcggcatcatcggcggtggacagcttggccgtatgatggcactgtccgcgcgatatatgggcttcaggatcggggtgctcgaccccacccccgattgtccgaccgcgcaggtggctgatttccagatcgccgccgaatacgacgacatcaacgccatccgcgaactggcagagcgatccgacgtactcacctacgaattcgagaacgtggatgccgatgccatcgatcaggtgcgcgcccttgctgcggcaccgcagggtaccgatttgctgcgcgttacgcaggatcgtgtcaatgaaaagcgtttcatcaacgatcatggcaccgaaaccgctccgtggaaggccgtgaacagttttgaggaactcgacgcggcattggatgagattcattatccggccgtgctgaagacccgttccggtggttatgacggtcacggtcagaccgtactgcgttccgaagcggatttggagaaggtgcgcgcccgtggcgatcgcggcggtggcttccctcccagcattcttgagggattcgtcgattttgccttcgaggcgagcatccttgtggctggcaacggcgaggactacgtgaccttcccgatcgtacgcaacgagcatcgcaacaacatcctgcatatgaccatcgcaccggccgaagtgagcgatgaggtggcgtgtgaggcgcgcgaactcgccctgcgtttggctgagggctttacgctggctggtattctggccatcgagctgttcgtcaccaaggatggcagggtagtggtcaatgaattggccccgcgcccgcacaattccggacactacaccattgaggcatgctctttcgaccagttcgacgcacacatccgtggcatcgccggatggccgctcgaacagcctcggctgttgaaaccggccgtgatggtgaatgtgctcggccagcatgtggcgccgacccgtgccttgatcgccgatcatcccgaatggaacgtgcatgactattgcaaggccgaggtgcgccacgatcgtaagatgggacacatcaccgtgctgaccgacgacaccgccgaaaccgtggccgatctggaatcgaccggctgctggaacgacttgaagaaagcctgaaattcgaaccaatgagtgaacacatcgtacgtcagacccgtcagaaggatgcgatccgggaggcgctgagcggcaatgacgaattcatctccgcccaggacctgcaccgcaagctggaagacgagggtgtgcatatcggtctggcgacggtgtaccgccaactcaacgcgctggtcgagtcgggccgtgccgatacggtacggctcgacggccagcaattgtaccgtttatgcggtgacgacgggcatcaccatcatctggtatgtacgtcatgcggtaaaaccgtggaaatcgaccctccgagtgaagactggctgcgcggcatcgcggaaaagcacggcttcaccatcgaatcgcacaccgtcgaggtgttcggcctgtgccctgactgtcggcaccgtcgatagccgtacgggaagacgtagcattatcgcccgcgagtagcgaaaatcgtaaagaaatatgctcgcataccgctcttttcaggaacatatatcacaatgagcatggcaaaacgtgaacaaagtggggaaacgcgtgaccagaacatccgtgaacaaaccaattgaagaactgagcatcgcaacggccggcccgtccgctcgcggcaaggaacgcaaggcgttcccgggttggctctacgccgtgctgttcctggtattcgattttcttgcgattgcgattctgcagtggggcgtgacgctgtccagcactagggtgacgctgtccagcccgctcaacggtctgggtgacctcgtctcgaaaatgtggctgaagctgaatttcgtgcttctgctgaacatgatcatggtcggcatcgtctatctggtgctgctcatgctgtgcaatcgtttctggatagccacgccggtactgatcgcaatcgccacggtcattgcggtaatcgaacgatttaaggttgagattcgttatgaggcgattctgccgtccgatctgaactttctcggttcgaacaccggcaatctcatgagtttcatgccatcgaatgcgccgctggtaattggcgttgccgcggccgcgttcgtcgtgttcgtggcattgatcgtgttcctcaaccatatcgacgggcgtcatggtcgcatgatccgcagtgccaaccccgggcttgccgcagtcacccgactgctgctgatcgcggtgcccggtctcgggttcggtctgtatgtcgcgcaggtcggcaccgtggattcatgggcatacggcctatcccgaggcatgggagacacgccttccatgtgggattccgtctacgatgcgcagcgcaacggcccggtcgtctccttcgtgcgtcagctcaatccgaaagtcatggacaagccttccgattacagcgaagagaccatgaaggccgtggccgcacgctatgcaaaggccgcgaagaagatcaacgcgaatcgttccgcgaacatgaccgacagcaccgtaatctatgtgctgtccgaatccttctccgacccctcgcgtgtgccggggctgaaggttaacaaggacgcgatgccgaatatccgttccatcaaggagcacaccacttccggcctgatgctctcttccggatacggtggcggcaccgccaatctcgaatatatgggtctgaccggcctgagcatggcgaatttcgattcgtcgctgaccagtccctaccagcagctggtgccgaccgagcattggacgccgaccatcaaccagatgtggggcgctgccaagaactccatcggcctgcacccgtacgagccgtccatgtattcgcgcgccacgaattataagaagttcggtttctcgcacttctacacgcttgaaggcgatgacatcatctcgcatcaggacaagatcgatgattccccgtacgtcagcgacgaggccgcctatacgagcaccatcgaagaggtgaaaaagagcaagagcggtcagttcctgcagctcatcaccatgcagaatcacatgccgtataagaattggtacaagaacaatgagttcaaggccgaatcgaccaccggcacaccgctgggggaaggcgaaaccgagtctatcgaaacctatgccaagggcgtggaactgaccgacaccgccaccaaggacttccttgagcagcttgacgaaatcgacaagccaatcaccgtagtcttctatggcgatcatctaccgggcatctactcatccgccagcgaggatgaggataattcgctcgacctgcacctgaccgactatttcatctggtccaataaggcctcgtcctcggccaataccaagatttccgacgacaattactcttcgccgaacttcttcgtggccgaggcggccgaacatatggacgccaaggtatcgccgtatctggcgttccttacgcagatgcattccaagatcgccgccatggaaccaccggtcgtcaacaacatccaaggctgggatcgcattcccgaaggtcagaacatctatcttgaccaagacggcaagccgatggccgaaaaggatctcgatgccgaaaccaagcagttgctggccgactacaggctgatccaatatgacattacggcaggtaagaactatctgaaatccaccggtttcatgaatctgccgaagtgatggcggcggcatgccgcgaacggtgcggttgacgggatcgagggcgaccattgatcccgtccgctcacgaatgcggtcgaaattcacggcgagcccgccaatcgaatggtttcctggctgtacaggcattcgatcggcgggctcgcttcgtatgttcgtatgtcgtttatgcgttcaacgccttggaaccgatgtcgtggcggtagaacatgcctgtggtgtcaagctggtcgatgattgcgtagaccttgtcctgggcggccttgatgtcggcggcggaggtttcgacgagcagcacgcggccggagctggccaccagaccgttgtcgccattggccacgccggcgtagtagacatgggaatcctgatcaaccggaatctcagggattgcggcaccgttgaccacgttgaccggatagccttcggcggcgagcaccacgccaagggtggcgttctcgtcatcccaagtgaactccggggcttcgccgttaagaatggcattgatgccggcaccgaggtcggaagtgagtttcggcagcaccacttcggtttccggatcgccgaagcgggcgttgaactcgatgaccttcggaccgtcggcagtggcgatcagacccgcatacagaatgccggtgaacggtgtgccctcgtcggccatggcttcgacggtcggtttgacgatggtctcaatggcggtgtcgatcacatcctggccgatttgcggcaccgggctgtaggcgcccatgccgccggtgttcgggcctttgtcctcgtcgtaggcgcgcttgtgatcctgcgaaatcggcatcggccagaagtcggtgccgttcacgaagctcatcagcgagaattcctgtccttcgaggaagtcttcgataaccactttggcaccggcattaccgaaacggtgatcgacgaaaatatcttccaaagcggcaatggcggtttcctcatccatcgcaacggtcacgcctttgcccgcagccaaaccgtcagccttgatcacgatcggggcaccatgttcgcgcacgtaggctgcggaacggtccaggtcgtcgaaggtctgatactttgcggtcggaatgtcgtgacgttccataagctgcttggcgaaatccttggagccctcgatctgggcggcggccttattcgggccgaacgccttgatgccggctgcggcgaaatcgtcgacaatgccttcgatcaacggcacttccggaccgacgaatacccagtcgtagtcgttgttcttcacgaattcgaccagcgcggcatggttggaaggattgagctgcgtagtgcggatgccgtccagttccatgcccggattgcccggggccacggtgacctcgctgacactgccgccacgcatcaacgcgtgcgcgatggcgtgctcgcgcgcgccggaaccgataaccagaaccttcatatttcctcctatcactgtccccgccgaggggttgctacgaaatgatcggggtgaaccgatccggttcaccccttattgccattactgaagttcgacgtcgtcgttggtcttcttcacaatgctgcccagcacatagccggtctcgccgttgctcttcagcaactccatggtttcatccgcacggtcggcgctcacggccagcaccatgccgatacccatgttgaagatgttgaacatttccatatgatcgatttcgccggccttctcgagtacgtcgaaaattggcaggatcggccaggagccgaggttgatgcgggcggcaaggccgtccggaatcatgcgcgggacattctcgatgaaaccgccgccggtgatgtgggccacgcccttgaccacgcccgcctcgaacagtggggaaagagccttcacatagattttggtgggggtgagcagcacgtcgccgagcttttcaccgttcagctcgtccagcacggtgtccacggtgtagccggcctgttcgaacaaggctttgcgtaccaaggagaagccgttggaatgcacgcctgtggatggcaggccgatgagcacgtcaccttcgcagatggtggagccgtcgacgattgcggacttttcagccacgccgactgcgaaaccggccagatcgtactcatctgcgtcgtacatgcccggcatttcggcggtctcgccgccgatcagaccggaaccggcctgcacacaaccgtcggcgactcctgaaacgacctgctcaagcagggccgggtcgttcttgccgcaggcgatgtagtccaggaaaaagagcggttcggcaccttgggcggcgatgtcgttgacgcacatggccacgcaatcgatgccgatggtattgtgcttgttcgccatcttggccacgaccaacttggtgccgacgccatcggtaccggaaatcagcacaggctccttatagccgagagaagcgaggtcgaacaggccgccgaagccgccgatgccgccgaccacgccaggacggttggtgcgtgccacatgggacttgatgcgcttgacgacttcgtaaccggcttcgacgcttacgccggcctcttcatatgcttttggcatatcaaacctttctagggttccagtgttcttctttgtggttgcggacgtgtaatgagtcgggttccggatgatcgaatcgccatgcggaacccgaaacggttattcttgtgcctccgtcggctgcaccttgtactcgttgccctcgtacttgctcttgtacagggcgaactcaggcagacgcacgcgatcctcaggggtgagggatttgaggaagtcggcttcgtagtcggcaagggcggtggggtagtcgccgttgaagtaagcgacgcacaggcctccgtagggcgcatccgcacccagaccgatggattcgaccaagccgtcgagcgacaggaacgccaaggagtcggcaccgatgaaatcgcgaatctcctcgaccgatttcttagcggcgatgagctccttggtggtggagatgtcgatgccatagaaacacggatatttcagcggtggtgagctgatgcgcatgtgcacctctgccgcgccggcctccttgagcagctgcacgatgcgcttggaggtggtgccacgcacgatggaatcgtcgatgacgaccacccgcttgcctttgaccacgccgcgcacagcggacagcttcatacgcacgccctgttcgcgcagttcctgcgttggctggatgaaggtgcgggctacgtactggtttttgatcaggcccatttcgttcggcaatccggcggtttccgcatagccggaagcggcggagagcgaggagttcggtacgccgatgaccatgtcggcctcgaccggggattcctgcgccagtcgtgcgcccatgcgcttgcgggcggagtgcacgttcacaccgtagatgtcggaatcagggcgggcgaagtagatgaattccatcgagcagatggccaactgcgtctggttggtgtattgcacgatcttgtagccgtggtcattgatcactacgatctcgcccggacggatattgcgcacgagttcggcgccgacgatatcgagcgcgcaggtctcggaggcgagcacataggcgccgttcttcatcttgccgagggagagcggtcggaagccattcggatcgagcgcaccgatcatggcgtcttcggtcatgatcagataggcaaaaccgccgtgcacggtgttgagcgcttccttgagtttgtccatgaacgtacgttgcgtggaacgacgcagcaggtgcatgagcacttcggtatcggagttggaatggaagatcgcgccttcatcttccagcttgcgacgcagggacgggcaattcgtcagattgccattgtggcatagggccatatcgccgtcatggaaacggaaaatgaacggttggatgttgtcggtgccgcccgaaccggcagtggcgtaacgcacatggccgatcgccctgtctcccttcagacgttcgatttcacgttcgtcgctgaacacctgggtcagcagacccgttccgcgatgaccgatgagatgaccattatcattcgagacaatgccggcgccttcctgaccgcggtgttgcaacgcatgcagaccgaagtaggtgagtcgggcggcgtccgggtggccccaaacgccgaagataccgcattcctcgtggatgtcttcgagttcagctgacaagccaaagctccttccaaaaccatggagacaaggggttcgctaccgttcaaccctaccaaccgccggctacaaccggcgggtttggaaggaatgatgaaacacgcggcatgtcgaacggatgttcgaaaaccttgctatgatgagggggtaaatcgtccattgtcggaagggtggaaggaaggaccatggccgaacgtacctatatcgccatcgacctgaagtccttctacgcctcgtccgaatgcgcggaacttggtttcgatgcgttacgcacgcatctggtggtggcggatcagtcgaggagcgacaagaccatttgcctggcggtatctccgtcactgaaggagtacgggcttcccgggcgtgcgcggctgttcgaaatcaaggcaaaactcaaggaggtcaacgcgactcggcgcaaggcggcgccaggaggcgtgctcatcggcgaatcgtacaaggcggatgagctggaggccaatccgaatctcgccgcaggcgtgtacatcgccaaaccccgcatgtcgcactatctcgccgtcagtgcgaaaatctacggcatctatctgcagtatgtggctgcgcaagacattcatgtctattccattgacgaggtattcatggatgtcaccgggtacctgcgtgcctacggcaaaggcgcgcacaatctggcgaaggaaatcatccaacggatcttcgacgaaaccaccatcaccgcgacggccggcatcggcacgaatatgtatcttgcaaaagtggccatggacattgtggcgaagcatattccggcggatgcggacggcgtgcgcatcgcgcaactggatgagatgtcataccggcgtctgctgtggaaccatcggccgttgacggatttctggcgcgtgggccgcggatatgcgagaaaacttgaggcgcaagggttgatgaccatgggtgatatcgcccgatgctcgctgggcaaggcctccgaatactacaacgaggatctgttgtacaagctgttcggcgtgaacgcggagctgctcatcgaccacgcgtggggttgggaaccgtgcaccatcgccgatatcaaggcgtataagccggccgggcacagcatgagttccgggcaagtgctcacgggtgccgttggttttgagaccgcacgactgatcgccaaggagatggcggacacactgtcgttggatctggtggccaaaggcgtgaaggccggccgtatgggactgatggtcggatatgacaccgccagtttggatccgaaacggttgggggaatgcggtacgccggaattgaagatgattgccgagcgggcggcggctgagtacgacggtccgattgcggttgaccgatatggccgccgtgtgcccaaacctgcgaacggatcgattgatctgagggagtgcagttcctcatcggcccgtatccgtgacgccgtggatgagctgttttgcgcgattgcggacaggcggttgctggtgcggcggttgaatgtggtcgcagcggaattggttgctgaagaggaattggccgcacgacgaacggttcctgactatacccaaccagacttgttcgatattgtcgagggagacgtggaagcgcaggacgttgcggctcgcggtgttcggccggaaccggaaatgaccgaacgccatgtacaacgaaccatccttgacatcaagcgcaagttcggcaacaacgcagtcatcaaaggcatggacctctttgatgacgctaccggtcagcagcgcaacaatcagatcgggggccatgccgcatgagcctgcaggagacccatcgctacgacgacatcatcgatctaccgcattgccagtcgcgcacgcatgcgcacatgagcacgcataatcgtgccgcccaattcatgccgttcgccgcactgactggctatggggatatcatcagacagaccgctgaatccagcaatgcggccgtcgaacgagccaacgcgcccgtgaacctcgaagacggttacttttccgcctgagtctacgggtttgtcagtgctcgccaacgtgtttcttggcatgtttccggcgtcgactgaatgcgtgtgaatcttgctgggtcataatcatgagcgaactgtccgtatatgtgagagagaggggcggtcattccgtctgcccaggtgtcgaatatgcgtcgtgcaacagcgggaagattgttgaccgtgctgtagcagacgcagacttggttgcttagtataaatggtttctcgttggtttcgctagccaagtaatcgacattcatgccgatgaaatcagcgataatggcgtatggtaaggccaatgatatgacatacgacgtcgtagtcactacgggcctctcaagagaaagagaagattatgacggcaaaatccgttatgaggaacatgaatagcaagaaggcgaaaacgatcatcatcgttgtaggcatcgtggtctgcgttctgctgggaatgttgatctaccgcaaggctgaggatttttttaatcctcagaaggaggggtctacaatcactacgacgatcgtttctcgtcagcttgaaaagatgcaggatctgaccaccgcgaaggagaacgactacgggtttgaggagttctccgagggcaaggtctcctatgtgaacaagaagaagttcaccatgttctacagttacgagattcgtgccggtgtcgacttgtctaaggcgaagattgcggttgataacgaagcccacacgatttccatcacattgccgaaagcggagttgcaatcggtgtcagtcgatcctgattctctgaaattctttgatgtggaaaactcattgtttaatggcaatgatgtaaccgacaccgctgacgcgttgaaggaggcgaagaaggcggcatcgaacaaagccaacaaaagcgagcttcttcaggaagccaacgatcaagctgtggaaatcgttgaaaaagcgtatgcgccgattgcaaaggcagatggatataaggtcaacgttcaattcgccgacaagcagtaagcggttccgtcaatggaggtgtaattgatgcaaggcctgattcatatcagatgaacatcatttgagtacagagtcggtgaatttaatatctggtctcggcttatttcgcttatagatggcggttccatagcagaatgacagttaaatttgtaatgaatataccccctaagctggatttccatttcttcatctgccatctataagcgagatagcgtaaagaagcggttgtactggcgtggctccatgacatgaaacatgtaaggcttggaagaagattacggtcggtgtcactggattgaagactgactgtatacggataaggttcggcggcggaaagataagggagggttggaatccacgcaggattccaaccctccccctttggcctatgcgttcactgccgaggtgctcaggcggtgaaatactccacgccggctgcgaacagcggctggtctttctcgcccggcacgttcttgaacgtgccgttactgtagcgctcggagtggcccatcttgccgaacacgcggccgtccgggctggtgatgccttcgatggccagcagtgagccgttcgggttcacgtcgaggtccatacccggcacgccggcctcgtccacgtattgcgtggcgatctggccattggccttgagctgggcgagcacgtcgtcggaagccacgaagcggccctcgccgtgggagatggcgatggtgtgcatgtcgcccacctcggttttggcgagccacggggagaggctcgatgccacgcgggtgcgcaccaagcggctctggtggcggccgatggtgttgaacgtcaacgtcgggcattcggcggtcatcggcacgatatcgccgtacggcaccaatccgagcttgatgagcgcttggaagccgttgcagatgccgagcatcagaccgtcgcgattgttcaacaggtcgcgcacggcctcggtcacggccggggcgcggaagaatgcggtgatgaacttggcggagccgtccggctcgtcgccaccggagaagccgccaggaatcatgatgatctggctcttcttgatctcctcgaccagcgcggcggtggattcggctacggcagccggggtgagattgttcacgatgagcgtgctcacgtcggcaccggcacgttcaaaggcggcggcggaatcatattcgcagttgttgccggggaacaccggaatcaccacatgcggcttggcgatgccggcgccggtatacagggtcttcttcggcgcgttgaaagacacggtttcgacggtcttgcccttgtcttcacccttggaacggtacgggaatacggattcgatgccgctctcccaaacatcctgaagttcggccagttccagcgtctcgccggcggctgagaaggaatactcctcggtggtcttgccgatctcgccaacctccaccagattggacatggccggaatcttggcaccgtcggccagctccacaatgaaggaaccgtatgccggagcgaacaggtcgtccacggagatgccgtcagctagcttcacgccaatctggttgccgacggtcatcttgaagatggcctcggcggtggcgccgtaacccggtgtggatacagccaacgcatcgccgaattcagtgaatgattcgatggcggagaacacttcgagcagcgcatctttgtccggcatcagaccatcagcctggtaacgcggggcgatgcggaccacgcggtggccggcgcccttgaactcgggggaggtagcgcgcttcatattgcccaccgccacggcgaaggaaatcagggtcggcggaacatcaagctgctcgaaggtgccggacatggagtccttgccaccgatcgcacccgcacccagatcgatctgggccatcagggcgcccagtacggcggccatcggcttgccccagcgttccggttcatcgcgcagcttctcgaaatactcctggaagctcaggtaggccttctcgtgctcgaaaccggcggcgaccagctttgacagggattcgaccacggacaggtatgcgcccgtgaactggttcttctccatgatgtacgggttgaacccccaggccatcgcggaggcggtggtggtttcgccgaacaccggcaacttggcgaccatggccatgttcggagtcagctgcctcctgccgccgaacggcatgagcacggtgcctgcgccgatcgtggaatcgaaacgttcgctcaagcccttgttggaagccacgttcaggtcggtgagcatggtgcgcatacgctcggacagcgagccggaagcccacggcgtggcgtaatcatgctgcgcttcgacatgcaccacctgatgcttcggagcgccattggaggcgaggaattcgcgggacaggtccacgatcgtgtcgccattccagaccatcgtcatacgcggattttcagtcacggttgcgatgacctcggcttcgaggttctcttccttggcgtagctaaggaactcgtccacatcctccgcagccacatccacggccatacgttcctgcgattcggaaatcgcaagctcggtgccgtccagaccttcgtacttcttggataccttgttgagatccacatacaggccgtcagccagctcgccgaccgccacggatacgccgcccgcgccgaaatcgttgcagcgcttgatcagacggcatgcgtcgccacgacggaacagacgctgcagcttgcgttcgaccggtgcgttgcccttctgcacctcggcaccgtcgagttccagcgattcgacgttgtgggctttggaagcgccggtcgcgccaccgatgccgtcacgtccggtacgtccgccgagcaggatgatcttgtcgcccggggccggggtctcacggcgcacatgatcggccggagtcgcggccacgaccgcaccgacctccatgcgcttggccacatagcccgggtggtagatctcgtcgacctggccggtggccagaccaatctggttgccgtaggaggaatagcccgcagccgccgtggtgacgagcttgcgctgggggagcttgccctcaagcgtttcggaaaccggaacggtcggatcggcggcgccggtcacgcgcatggcctggtatacgtaggaacggccggacagcggatcgcggatacagccgccgatgcaggtggccgcgccaccgaacggctcgatttcggtcgggtgattgtgggtctcgttcttgaacaggaacagccagtcctcatcctgaccgttcacatccaccttcaccttgacagtgcaggcgttgatctcctcggattcgtcaaggttcttcaggatgccgttcttcttgagccacttcgcaccgatcgtgcccatatccatcaggcacaccggcttggcgtcgcggcccagttcgtgacgcatctcaagatacttgtcgaatgcggccttgacggtggcatcatcgatggtgacctcgtcaagctgcgtgccgaatgtggtatgtcggcaatgatcggaccagtaggtgtcgattaccttgatttcggtgatggtcggatcgcgttgctcctcggtgaagtgcgcacggcagaactgcaggtcggccagatccatggcgagaccacggtcggcgatgaaccgctcaagctcggcgtcgctcatggtgcggaatccgtcgatgacctccaccttgcccgggaccggcacctgggtcctgagtgtggtcttggtgtccagcgaagcctcacgcgcttcgaccgggttgattacgtaatgcttgatggcgtcgacgtcttcggcggaaagatcgccttccaacgcatacaccttggcggagcgcacggtcgggcgctcaccctgcgaaatcagctggatgcattcgctggcggaatcggcacgctggtcgaactgtccaggcagatattccactgcgaacacggtgtccgtgccaaaatccggcaaatcggcggatacgttgtccacctgcggctcgctgaacacggtcggtgtggcctgggcgaacagttcttcgctgatgccttcaacgtcgtaacggttgacgagacgcacgttcttcaatgccttgatgccgagaatggtcctgagctcgttggcgagttgtcgtgcctcgacgtcaaagccgtgcttcttttccacgtatacgcgaaaaaccatgtgtcatctccttctcacaaaagtttcgggattccaaagaatgatgaaaacaaattgagcccgcatccggcttgtgcttcagatgcgggctgcacacgtattattcggctacttcgatgccttcggacttggcgagctcggccagacggctctcaatctcctcatatgcggggatgatgtcgcccaagtcgcggcggaacagatccttgtcgagatgttcgaccttgccggacttgtcgcgctgatcccacaggcggcaggagtcaggagtgatctcatcggccagcagcagcgtgccatcggaggtacggcccatttcgatcttgaagtccacgagcttgacgtcgatcttggcgaagatctcgatcagggcctcgttgatgcggcgggcgagtggtgcgatttcggcgagatcctcgcgggtgcaggtgccgagagccaccagatcgtcgtcgttcacgaacggatcgtgcaggtcgtcgttcttcaggaagtattcgagcaccggctccttcaaagccatgccctcttcaacgcccaagcgagaacagaaatggccggcggcggtgttgcgcagcacgatctccagcgggaacatggtgaccttcctgaccagctgggaggtgtcaccgacgcgggccacaaggtggctttcgatgccgcgtttcttcagaagatcgaagatgagggtggtaatgagattgttcaacctacccttgccggcgaagtcttctttcttctcgccgtcacctgcggtagcggagttcttgtattcgacccaaagcacttccggatcgtcagttgcgtacagttgcttggccttgccctcgtagagcttttccagcttctccattactcgcctttcctggggttggtaggtagatagtttggtgaacttgacggttaacaagataccaacgggaggctacaatcggggcgttttcggtgcgttccgaaaacgccctcgaagggtggtcaggctacgctgaccgtaagcgtttcggctacatgtgcggctttggcccgagcgtcggattcgctggctccgatggccagcgccaccgccatgcgacgatggccatgcacctcaggcttggcgaagatgcgtaggtcggtttccggctcggccaacgcatcggcgacgttcatgaattcagcctcgccgtcacccgccaccacgatggcatggctggcggcgacggatcctgccggaatggaaagcgccacgtgaccttccgtaatcggcaggccgagaaccgcgcgggcgtgcagggcgaactcgctcaggcgttgcgaggccatggtcaccatgccggtgtcgtgcggtcggggcgaaacctcattgaacagtacggaaccgtcggtcagcacgaacaattccacgccgaacacgccccaaccttgttctccggaggccttcgccttcgccacaaggccttccaccgcagttcgtgcgatacgttgcgcctgttcgagcacgtttgtggtaaaggcggccggttgccaggattcgcggtaatcgccgctttcctgacgttgcccgatcggagcgcaggtcacgatacctgccgaggagcttacggtcagtacggtcagctcgtagtcgagcggggccaacgcctccacgatcacgcgggacacatctccctcatcatgcgcacgccgaccctcctgagcttccgtccaagcggcgtcaatcgcacctgcggaacgtaccacggactgtccgtgaccggaagagctcatgatcggcttgactacgcagggatatccgacgacttcggcaccggcgcgaagttcctcgagcgaaccggcgaaacggtacggcgtggtcggcagtcccaaatcctcatgcgcaagtacacgcagtcgttcacgatccatgcatatcgccgcgatttcggcactcggcaccacctgcgcaccatgagcggcggctgcggccagttcggcggtggcgatcgcttcgacttccggcacgatgatatccggcttgacttcatcgaatagcgcacgcagtcgttcggcgtccgccatgtcaagcacacggtattcgtgggcgacttgttgggcgggggcgccggcgtaggaatcggccgcacacacccaggcgccgagcctcatcatttcgagggcaacctccttgcccagctcaccggcgccaagaaacagaacgcgggtcggatggttgccaagcggagtgcctaaggtacgattctcttcagtcatgattcttattgtgccatcggcgtaggatggggcgcatgcttgagaacgaaaagaaggaagccgaccgaccgttgaccatcgccatggtggtcgacacatcgggcaaccggggcaacggcacttcgaattccgccctgcaatgggcgcaggagctggaacgtcaagggcatcatgtgcgtctggtcggcatcggggcgcctgatttcccggctcgtgtaaaccatgtgccactggtgagctgggtggcgaagcagcagcagatgcaattcgccgaaccgagcgatacgctgttccgcgcggcgttcctgggcgtggatgcggtgcatatctacacgccgttccgtttcggacagcatgcctgcaaggtggccaggcagatgggcatcgcggtcactgccggataccatgtgcaaccggagaacatcacctactccgcggggccccttaaatacgtgcctggcattgactcatttatatattggctgttcaatatgtggttgtatcgcaggatcggccatgtgcacgtacctaccgagcttggcgccagtctgttgcgttcgcatgggtataaggcgaaactgcacgtgatttccaacggatatgagactcgtttcacgccgagacggcaacggagggaagacggggccgtcgccaagccgttccgtatcgtcgcgtcgggtcgtctgacccacgagaagaatcatgtcatgctgattcgtgccatcgcgcgatgccgtcatgcgcaggatatcgaattgacgatcgccggcaccggcccgttgaaaaagaagctgcagaggatggccgaccgtctgctcgcccgccccgcctccatcggattccataggaacgccgatatgccggccctgctgcgttccggtgacctgctggtgcatccgtcgatcgccgatctggaatcggtgagcgtgatcgaaggcatggcatccggcctggtgccggtaatcgcttcgtcatcgttgagcgcagccggacagttcgcgttatgcgacgagtcgctgttccccgttgacgatgtggatgcgctggcccgccgcattgactggtggatcgaccatccggcggaactcaacgagtggggttccgtctacgccgaacataccaaggaacattattcggtggccgcttccgtacgcaagttcgtggccatggagcgcgaagccatcgcggacaacgcgaaatagccgctcgtgccggaccgtcaggaccggtggagtgagctagagcagtgcgataagctcctcgacctgctcatcggtggtggcccagctggtgcagatacgcattacggtgtgcgtgtcgtcggccttctccatgaagcccagacgaacatgccgctgcagacgttccgatgtctcattgtcaagcgtgatgaaaatctgattggtcggtgcgtcgaaggtcagtacatagccgcgttccacgagtgcttcgcggatacggtcggctgcgatgttggcgcgacgtgcgatgcggctgtacagatcatcggtgaacagcgtgtcgaactgcagcccgagcagccagcctttggccaggagggcaccatgccgtttgatgagcgtgacgaaatgcttcggcacgctgccatgcgtgaataccacggcctcgccgaacatcgcgcccaccttggtgccaccgatatagaacacgtcggcgagccttgcgatgtcttcaagggtcacgtcgttgccggtggcggtcagcgcgtagccgaggcgtgcgccgtcaatgaacagcggcagttcgtattcgtcgcataccttgcggatcgccttcagctcggacagcgtgtacagcgtgccgtattcggtggcttgcgagatgtagacacagcccggaaacaccatatgcgtgtagttgccgtccgcgtagaagttcgcacagtactcatcaagctcgttcgcgtcgattttgccgtcatgatgggggagcgtcagcaccttgtgcccggtgcattcgatggcgcccgcctcatgaacgttcacatggccggtatcggcggccaccacgccggcgtactgcggggtgatggaatcgatgacgatctggttggtttgcgtgccgccgaccagaaagaagatctcggcttccgggcttgcgcatgcctcacggattttcgccttggcggattcgcagatttcgtcgttgccgtagccgggatactgttccgtggcggtattccggatgctctcgatgatttccggtgtcgcggcgcaggaataatcgttttcgaaagacagcatgatgctccttagctggttgccatcggtcgtatgtcttcgggaataacaaaaaacctcggaatgtcttccgaggtttaccggggtggctaacgcggctcgaacgcgcgaccttctgaaccacaatcagatgctctaccaactgagctatagccaccatgtcgttactcccctaaggaagcgcaacaggtgaatactatacacgatttttcggggatggatattccggcgtgttgcgttggaagaaacggcatccgtcgttcagcatatgaacgcggtgtcacatgcgcggcacacgttggcataggttgtatccgcaatccaaaagatgatgttgacgtatcaatgacattgctgaatcgagagagaaatgcagaaagtcaaagcctttggtgagtggctcaccaaatggttcaccgcaatcgtgatcgtgtgggccgtattcaattatttcgttcctcaggccagcttgtggggcaagtcctataccggttactttctgggcatcgtgctgttcggcatgggcctgacgttgacgcttgatgatttcaagcgcatccttactcagccgttgatggtgatcgtcggcaccgtggcccacttcgtgatcatgccgcttgtcgccgtgctactgtgctggatcttccgtcttgatggcgcactggccgtcggtgtgattctggtcggctgctgcccgtccggcacctcatccaacgtgatgagctacttgagccgtggcgacgtggccttggatgtgtccatcggcatcctgtccacgttgtgcgccccgttcatgattccgctgctgatgcagtggctggcctcccagtacgtgaccgtaccggtcgaatcgttgttcctcaacgccgtcaaggtggtgctcttcccgattgccctcggtgtgatctgccatgccgttttcaaggagaaaatcgagaagatcacggtggcgctgccaatcgtctcccaggtcgccatcctgctcatcatcggcgtggtggtcgcggccaacgggccgaagctgttcgtggcctcctccctgctggccattccggtggtcatgctgcacaatctgtgcggttacgcgctgggcttcggattctccaagctgatgtacaaggtgtatccgaagggtttccgctatgcgcagcagaaggccatcaccttcgaggtcggcatgcaggattccgctttgggtgccaccctggccctgacctccttcgcgtccaacccgttggcagccgtgccgtccaccttcttcagcgtgtggcacaacatctccggctcggtgctttccagttggtggcgggagcatgacgacaagcatcggattcaccccgattccgacaacggcgagaagggaaccgcgaccaaggccgatgccgacgaagtcgaatcaaaggccactgaatcgacgaatgcctgattcgttccgcttgatcgcctgatggcgatatgtgtatgcaacccctgaaccgctcagaacggctcaggggttgttcgttttcgacggtaattccggattgtctgttcggttttgtcgctttgtgcccgtaaggcgtaaagcattggaattgttgggatttgacagtgtcgctacccgtgtttcgcgtgcggtttagggtatactaataagtgaaggccggagttgtggatcggtcgagaagtcggcaggtcgcaacgaagcgtccacggccgcgaggcacatgcgcaacgccttcaagataattgaataataactgaagaataattgaatatagcgattcgaaaaggcggcaagaggcagtacggcagggaggccgggccgcagcaaaacagacagtaggcatcgcatttgggttattgtgaacgcgcaaggtggcgcgtaagaaccgagagtgggaacctccttccccgagcgaatggtcccggtggcgggtaagccaccgggaccattctttatgccatgacacgacgggaaaggtattgtccggcaagagcgtatactagtaattcgtgtgtgccaatggcatgccttatgtaacaggcgtgcggattgggatatcccggaactcgtgcgaatcacgcgcagtaatgcggcggtgagagaggaacgggccatcgggccggtggactgtggctgttttacgattcggtgtcgtgaagtgtgcgcagtgcggcggtcacacgaagacaaaagaaaccactgaatcggagaattcaagttgcctactattgaacagctcgtccgtaagggacgtcaggcaaagccgaagaagtccaagactttggcgctgaagggaagcccgctgcgtcgcggcgtgtgcacccgtgtctacaccaccaccccgaagaagccgaattcggcactgcgtaaggtcgcccgtgtgcgcctgagctccggtgtggaagtcaccgcttacatcccgggcgaaggccacaacctgcaggagcactccatcgtgctcgtgcgcggcggccgtgtcaaggatctgccgggtgttcgttaccacatcgtgcgtggcgccctcgatacccagggcgttaaggaccgcaagcagggtcgttccctgtacggagcaaagaaggcgaagtaagagatatgtcacgtaaaggaccttccaagaagcatcagctgctgccggatccgatctacggttccaccgttgtggcacagctcatcaacaagattctgctcgacggcaagaagtcgatcgccgaagacatcgtttactccgctctcgatatggtcaaggaaaagaccgagcaggagccggtggccgttctgaagcgcgctctcgacaacatccgcccgtccctcgaggttcgctcccgccgtgtcggtggcgccacctaccaggttccggtcgaggtgaagccggctcgtgccaacaccctgtccctgcgctggctgacggacttctcccgcgctcgtcgcgagaagaccatggccgagcgcctggccaacgaaatcctcgatgcctccaacggtctcggtgcctctgtcaagcgccgcgaggatactcataagatggcggaagccaacaaggcattcgctcattaccgctggtaattagtcgagtaacgagagttaaggaatactcatggcactagacgtgcttactgatctcaaccagatccgtaacatcggcatcatggctcacatcgatgccggcaagaccaccaccaccgagcgtatcctgtactacaccggcaagaactacaagatcggcgagacccacgatggcgcctcgactatggacttcatggctcaggagcaggagcgcggcatcaccatccagtccgcggccaccacctgcttctggaatcgtcagacccatgacgagaagcagaagttccagatcaacatcatcgataccccgggccacgtggacttcacggccgaggtggaacgttccctgcgagtgctcgatggcgccgttgccgtgttcgatggcaaggaaggcgtggagccgcagtctgagaccgtgtggcgtcaggccgacaagtacggcgttccgcgtatctgcttcatcaacaagatggataagctcggcgctgatttctactactccgtcgacaccatcaagaccaagctgggtgcgaccccgctcgtcgtgcagctgccgatcggcgctgagaacgacttcgccggcgtcgtcgacctgatccgcatgaaggcctacgtctggaacgacgtcaaggatgatatgggtgcccactacgacaccaccgacatcccggccgatctgcaggacaaggctgagcagtatcgtgcagagctgctcgaccaggtcgccgagtccgacgaggaactgctcgagaagtacctcgagtccggcgaactgaccgaagacgagatccgctccggcatccgtaagctcaccatcaaccgtgaagcctatccggtgctgtgcggctccgccttcaaggacaagggtgttcagccgatgctggacgccgtcgtcgactacctgccgagcccggaggacgtgccgtccatcgtcggtttcgatccgaaggacgagtcccacgaaatcgatcgtcacccgacgaccgatgacccgttcgccgctctggtcttcaagatctctacgcacccgttctatggcaagctcgtcttcgtgcgcgtctactccggcgccgtcaagccgggcgacaccgtgctcgactccaccaaggagaagaaggaacgcgtcggcaagatcttccagatgcacgccgacaaggagaacccggtggacgccgccgaagccggcaacatctacaccttcgtgggcctgaagaacgtcaccaccggtgacaccctgtgtgacgagaaggctccgatctctctcgaatccatgaccttccccgatccggtgatcgaggtggccgtggagccgaagaccaaggccgatcaggagaagatgagcatcgctctggcgaagctgtccgacgaggatccgaccttccaggtgaagaccgacgaagagtccggccagaccctgatctccggcatgggcgagctgcagctcgacatcatcgtcgaccgtatgcgtcgtgagttcaaggtggagtgcaacgtcggtaacccgcaggttgcataccgcgagacgatccgcaaggccgtcatgaaccaggaatacacgcacaagaagcagactggtggttccggccagttcgcaaaggttctgatgaacttcgaaccgctgaacaccgaagagggcgagacctacgagttcgccaacgaggttaccggcggccacatcaccaaggaattcattccttccatcgatgcaggcgtacaggaagccatggaatccggcattctcgccggcttcccggtggttggcgtcaaggcgaccgtcaccgacggtcaggtccacgatgtcgattcctccgaaatggccttcaagatcgcaggttccatgtgcttcaaggaagctgccccgaaggccaagccggtcatcctcgagccgatcatggccgtggaagtgcgtaccccggaagagtacatgggcgatgtgatgggcgatctgaacgcccgtcgtggttccatccagtccatgaccgactccaccggtgtcaaggtcatcgacgccaaggttccgctgtccgagatgttcggctacatcggcgacctgcgctccaagacccagggccgtgcaatgttcaccatgcagatggactcctacgcagaggttccgaagaacgtctccgaggagatcatcaaggcccagcgcggcgagtgacacacgccgccgcttcattggaaactgtctccagtcagcgttagtattttgtagcgctgactgggttcgggctccaaagtggcacaaacccgtcaaacccagtaatatgtagcgagtgccttgaaccgagttcaaggctgtttactacgagacgtccaggaggacaaaacacatggcaaaggaaaagtacgagcgtactaagccgcacgttaacattggtaccatcggccacgtcgatcacggtaagactaccctgaccgcagccatctccaaggtcctgcacgaagagtacccggacatcaacccggcctacgacttcaaccagatcgacgccgctccggaagagcagcagcgtggtatcaccatcaacatcgcccacatcgagtaccagaccgctgagcgtcactacgctcacgtcgactgcccgggccacgccgacttcgtgaagaacatgatcaccggcgctgcccagatggatggcgctatcctcgttgtggccgccaccgacggcccgatggctcagacccgcgagcacgtgctgctcgctcgtcaggtgggcgtgccgcgtatcctcgtcgccctgaacaagtgcgatatggtcgacgacgaagagctcatcgagctcgttgaggaagaggtccgtgacctcctcgacgagaacggcttcgatcgcgattgcccggtcatccacacctccgcctacggcgcgctgcacgatgacgctccggaccacgacaagtgggttgagtccgtcaaggaactcatgaaggccgtcgacgagtacatcccgaccccgacccacgatctggacaagccgttcctgatgccgatcgaagatgtgttcaccatctccggccgtggcaccgtggttaccggccgtgtcgagcgtggtaagctcccggtcaactccaacgttgagatcgtcggcatccgtccgacccagaccaccaccgtcacctccatcgagaccttccacaagcagatggacgagtgcgaggctggcgacaacaccggtctgctgctccgcggcatcaaccgtgaccaggtcgagcgtggccaggttctggctgctccgggctccgtgaccccgcacaccaagttcgagggcgaagtctacgtgctgaccaaggacgaaggcggccgtcactcgccgttcttctccaactaccgtccgcagttctacttccgtaccaccgacgtcaccggcgtcatcaccctgccggaaggcgttgagatggtgcagccgggcgatcacgctaccttcggcgttgagctgatccagccgatcgctatggaagagggcctgaccttcgcagtgcgcgaaggtggccacaccgtcggctcgggccgtgtcaccaagatcatcgagtagttttacccgatatcgcaaggcacgcttgaactagcgtttctcaggaaaacctccccagacccacgtctggggaggttttcccatatatatggaaggtgcgcaatcaaagtatgcacgccgtggcataatgggcaaggctatttttgagctttccctgttagtcgaagaaataggtgagttaatttggcacagactaccaatgacatcaagaacggttccgtcctgaacctcgacggccagctgtggtccgtcatcaagttccagcacgtcaagccgggcaagggtcccgccttcgtgcgcaccaccatcaagaacgtgctttccggcaagatcgtcgacaagaccttcaacgctggcatgaagatggaattcgagaccgtcgacaaccgtaacctccagtattcctatgaggacggcgacaacttcgtgttcatggacatgaccacttacgaccagatctacatcccgaagaccttggtcggcgatcaggccaagtacctgctcgaaggcaccgactgcgtcgtctccttccatgacggcaccccgctgtcggtggaactgccggcctccgtgatcctgaccgtgacccacaccgagccgggcctgcagggcaaccgatccaacgccggcaccaagccggccaccgtcgagaccggtgctgagattcaggtgccgctgttcatcggcgaaggcgagaaggtcaaggtgaacaccaccgacggctcctacctcggccgcgagaactgagagtagaaggacgaaagaagcttccatggcacgttccaccgctcgcaaaagggctctgaatacgttgtatgaagcggatgagaagggacaggacatcctgtcccttcttgctgagcgcatcgagcagcccggcgctcagacaccgctgcctgattatgccatcgaaatcgttcgtggcgttgcagagaatctttaccggatcgattccgtgcttgatgagcattccacgggttggaaggtcaagcgcatgggcgttgtcgaccgcaatatcctgcgcatcgccgtttgggagatcatgttcaacgatgatgtgcccaatatggtggcgatcgatgaggctctgggcctcgccaagacattgtgcgatgacgattccccggcattcatccatggcctgctcagcgcggtgagcgccgacgcgggtgatgttcaggtggatgaccacccgaccgacgattcggctcagtaaacagccgaaaggcaagcgattcggccgggtcgcgagtcctaaccggccgctatccttggtacgaataccttgactataagggggttttggtgaaccagtatgattccgaagccgtgacttttgcccctcaggatgccgttctcgttctcgaagacggtcaagtgtatgtgggcgaaccttacggtgcgatcggtacgaccagcggggagatcgttttcgcgaccggcatgaccggatatcaggaaacgcttacggaccccagctacgatcgtcagatcgtggtacagacgttcccgcacatcggggacacgggaatcaaccaggaggatccggaatcctccagaatctgggtcgccggatatgtcgtgcgtgaccccagtccgaacgtgagcaattggcgtgccacgggtagccttgacgatgatctggaatcgaaccatatcgtcggcatcagccatatcgacacccgcaagctggtgcgccatctgcgttccgcgggcgtgatgcgtgccgccattttctccggagacgccctgcttgacgcatccggcaagccgcgcaccattgaatccatgcttgacgaggtcaaggccactccgcagatgaagggcatgagcctgtacgacgaggtcagcaccgacgaggcctacaccatcgagccgtgcggcggattcgaaggcaaggagccgctgttcaccgtggctgcggtcgatctcggcatcaaggccatgacacctcaccgtatggccgaacgtggttgccgcgtgcatgtcgtgccgtccaccatcaccttcgacgagctcgaagccctcaatcccgacggcgtgttcttctccaatggcccgggcgacccggaacaggccgatccggaagtgaatctgctacgcaaggtgcttgacgcgggccatccgttcttcggcatctgcttcggcaaccagctgctcggtcgcgcactcggcttcggcacctacaagctgaagttcggccaccgtggcatcaaccagccggtcaaggacatgaccaccggcaagattgaaatcaccgctcataaccatggctttgccgtagatgccccgatcggcgaaaccgtggatgcgccgttcggcgacggcaagtatggcaaggtgttcgtcagccacatcgacctgaacgacaatgtggtcgaaggcctgcagtgcgtcgacatcccggcgttctccgtgcaataccatccggaggccgccgccggcccgcacgacgccgcatacctgttcgatcgttttgtggatctcatgcgttccgccaaggaggaaaaccgcaatgcctaagcgcacagacatcaagtccgtgatggtcgtcggctccggcccgattgtgatcggccaggccgcggaattcgattattcgggcacccaggcctgccgcgtgcttcgtgaagagggcattcgcgtcattctggtcaactcgaatccggccaccatcatgaccgatccggaaatggccgacgccacctacatcgaaccgatctccaccccgattctcgaacagatcatcgccaaggaacgtcctgacgcactgctgccgacgctcggcggccagaccgccctgaacgccgccatggctctcggtgaggccggtgtgctgaagaagtacgacgtcgagctgattggtgcctccctcgaggccatcgaccgcggcgaggaccgcgaactgttcaagaaggtcgtggaggaggccggcgccgaatccgcacgttccgacatcgcgcactccatcgaggaagtcgacaggatcgccgaaaagttcggctatccgctggtcgtccgcccgagcttcaccatgggcggccttggttccggcatcgcgcacgacgaagaggagctgcaccgcatcgccggtgccggcatccattattcgccgactgacgaggtcctgatcgaagagggcatcgagggctggaaggaatatgagctcgagctgatgcgcgacaagaaggacaacgtcgtggtcgtctgcccgatcgaaaacgttgatccggtcggcgtgcacaccggcgactccatcaccgtggccccggtcttcactctgaccgatcgcgaataccagaagctgcgcgatatcggcatcgccatcatccgtggcgtgggcgtcgacaccggtggctgcaacattcagttcgcaatccaccctgataccggccgtatcatcgtcatcgagatgaacccgcgtgtgtcccgttcgtccgcgctggcttccaaggccaccggcttcccgatcgccaagatcgcgaccaagctggctcttggctacacgctcgatgaaatccagaacgatatcacgcagtccactccggccagcttcgagccaaccatcgactacgtggtcaccaaggtgccgcgcttcgcattcgagaagttcccgggtgccgacccgaccttgaccacctccatgaagtctgtcggcgaggccatggcactggccggcaatttccaggaatcccttggcaaggccatgcgctccatcgacaagcgtcatatgggcttcaactgggacggcgacaagccatccgccgaagaggtcgaacagctgctcgaagccatcaaggtgccgaccgaacatcgctatctgcagattcagcgtgccctgtggggcggcgccaccgaagagcagatcttcgcggccaccaagattgatccgtggttcatccgccagttcgaactcatcaatgagaccgcattggaggtcagaaacgctgagaagctcaccggaaggctgctcaagaaggccaagctcgcaggtctgtccgatctgcagatcgctcatctgcgccacctcggcgatgaaggtgagaacaccatccgtgaactgcgctggacctatgacctgcgtccggtgttcaagaccgtcgacacctgcgctgccgaattcgatgcggccacgccgtattactactcctgctatgccgatgagaccgaattgcgtccgcgtgatcgcgaggcggtgatcatcctcggttccggtccgaaccgcatcggccagggcatcgagttcgactatacctgcgtgcacgccgtgcaggagctgggcaaggactatgacaccatcatggtcaactgcaacccggaaaccgtgtcgaccgattatgacatgtccgatcgtctgtacttcgagccgctcaccttcgaagatgtgctggaaatctacgaagccgaaaagaagatgggtccggtcaagggcgtcatcgtgcagctcggcggtcagaccccgctgtcgttggccgcgcgcctcaaggccgccggtgtaccgattctcggcaccacgccggaatccatcgacttggccgagaaccgtgagcttttcggcgaggtgctcaaaaaggccgacatgaacgcgccgcgttacggtaccgcattgagcttggaagaggctcgcgaggcggcccatggcatcggctacccggtgctggtgcgcccgagctacgtgcttggcggccgcggcatggaaatcgtctatgacgacgcccagctgcgcaagtatgtcgaccgcgcccttagggaggcccaggccgataccgtggtctccggccgtctgccttcgccgttgctgatcgacaagttcctgcaggatgccgtggaaatcgacgtcgatgccttgttcgacggcgaggaactctacatcggcggcatcatggagcatgtcgaagaggccggcgtgcattccggcgatgcggcctgcaccttgcccccgagcaccctgtccgacgaccagatccgtcgtctgcgtgagggtacatacgccattgccaagggatgcggcgttcagggcctgatcaacgtacagtacgccttcatggccaatacgctgtatgtgatcgaagccaatccgcgtgcttcccgtaccgtgccattcgcctccaaggccaccggtgtggctctggccaaggccgccgcccgcatcatggccggcgaaaccatccagcagcagcgagacaatggcctgttgctgcctcatggtgacggtggtgacatccgccgtggccagcaggtggccgtcaaggaatccgtattgccgttcaagcgtttccgtacctcgttgggcaagaccgtcgatgtgctgcttggaccggagatgcgttccaccggtgaggtcatgggcttcgaccgtgacttcccgcacgccttcgccaagagccagctcgccgcctacgacggaggcctgccgaccagcggcaacgtgttcatctccgtgaacgacaccgacaagcgtcagctgccgctgttcgccgcccgattggtggagctcggcttcaacatctgggccaccgaaggcaccgcctccgtactgcgccgctatggcatcgactccaagatcgtggataagatcagcgtgcgcatggattccgatccggaagatccggtcaccacctaccacgcggagggcagcgtcggcaagaacgtggttcagctgattgaggagggtgccatcgacctcatcctcaacacgccgaattcccgtggctcccgctccgatggctatgccatccgttcggccgcgattgcagccgatctgcctcagttcaccaccatgacggagttctccgccgtgctgatggcgatcgaggccgtaaagaataatgattaccagatcatgagcattcaggatcattccaagcagctgttcgaactggaaagccgtgagtaatgatgagtagcctcagcaatgaagagttaaacgcccaacggtccgatttcggtctgcgtctgagcaattccatggccaaatatggtccgttgtgcgtcggtatcgatccacatcgacaacttctcatcgactggggctacaacgtggatgccttgggtgcggagctatacgccatgcgtatgctccaagccgccaacggtcgggctgcggccgtcaaattccaattctccatgttcgagcgctatggttccaaaggcatcgcggcgctcgagcgtgtgctctatgcggcacgccagatgggtaccatcaccatcgtggactgcctgcacggagggctgccgaccacggtttcggcattcgccgacgcctacttcaaaccgggcgctcccttgctggccgatgccatcacgttgctgccgtattacggtgcacgttcgctcggaggcgtcatcaacgacgccctcaacaacgggcggggcgtattcatcgcatcgttgacctccaatcaggagggggccagcctgcagaccgccatccgccaggcaggggaatacaagggcaagaccgtggccttcggtatcgccagcactgcgcagaagttcaataacggcattgatggcatgggctccgtaggtctgatcatcggcgccaccatcggccagtggatcaacgacagcggcgtggatccatcgaaattcaccggcccgatcctatcgccgggttatggatggcaaggcgccgaaaaacgtgatctgaaaaccgtgttcaaaggcaccaagggcaacgtgctggtcactgtctcccgcttcatcgcggcacatggccccagcatcgccgctctgactgaagccactgaatccgtggctcttgacattcgtcaggcgttgctggaagcttccaccgaaggtgacgagatcgacgaagtcgactaggcgaatgccgttttccggcttgcatacgcagacgataaccaatcaaggatgttgcattcatgacttgtgtacataacgaagacgcaaccacccgtcacggaagactgattgtgctgtgcggacccgcaggcgtaggcaaaggcaccgtacttggccgtgtacgtgcgcagcatccggaaatctggttatcggtatcggcaactacgcgtcagccacgccccggtgaggtggatggcgtgaactactacttcatgagcgaacgggaattcctcgacagggaggcccgaggtgagtttctggaaaccgccgacgtgttcggtctggcgcattacggtacgccgattcaaccggttgcggaacatttggaacagaatgttccgaccgtgttggagattgatatccagggagcacgacgtgtcaaggaacgggcggaagagctcggcctcgatgtgatgaccgtgttcatcgcaccgccgtcgttcgaagagctcaagcggcgcttgatcgggcgtggtaccgaaacagcggaacagcaggccaaaagacttgaaacggcgaagattgaactggcggccgaatcggaattcgatgtggtgattgtcaacgaagtggtggaggatgcggccgcgcagctgtggaatatcatcgccacggagttcggactgtaggttccagtcggtacgacgaccgcagagggcgggaatacgaaaagggggttacgcgggtttttgaactgcgccccgattgttggacgttgttaaataggatacaggtctaggctgcgagggacacgcttcggaattcctccggggtgtgtccctcgagtcgtatctggcgtcgtctggtgttccagtggatgacgtacgcgtcaagttctcgtttgaattgctcgtacgagtcgaattcgcgcccccggtagaactcgtccttgaggtgtccgaagacctgttcggtggcggcgttgtccaggcagttgcccttgcggctcatggactggcggatgcccagccgttcgagctccccgcgccaccacgggtgctggtactgccatcccatgtccgagtgcaggatcgggttcgcgcccccgggcagcctggcttcgagcatggcgagcagacgccgctgctgccccatgccggggtgccggctcacgtcccaggcgacgatttccttgctggccatgtcgtacacgggcgcgaggtaggccttgccgcccgcgaccttgaattcggtgacgtcggtgccgagtttttcgaacggcttgccggcggtgaagtcgcgtttgagcaggttcggcacccctccgccagcgtcgcccctgtacgagctgtagcctctccatggattcccggcgcggatcgggcatctgagtcccatgcggcgcatgaccttcaggacgctcttggccgacaccttctgtccgaactcgtggaccaggcacatatggatctgccggtggccgcacccgttggccgtcctttcccagatctctgcgaccatgggatcgaggtcggggcgcgtctcatgcgccggatgcgacagatggtggaaatacgtggatctcgccaacccgctgatcttcagcaggtggtcgagccggtgcccctgccctgcgagcagtcggacgacggcgcttcgctcgcgcttcgtgacttctgcgcccgcagggcccggagtttttccaggtacgcgaccttcgccttcaggtaggcgacctcctcggtcagctcctgctcccgcgtgggtttcggccttggcttggatttcgcgcctttgggcctgcccttgggcttcggcctcaacgcctccgcgccaccggcacggtattcgcggcaccaacgctgcagcggggcgatgctcgctatcccgtacctggccatgacctcggccacgctcaagccgttctcgacgtggtcccgcgccgccgcgaccttcgtctcccagtcataacgcctgttgccggtggttcccatgaccgcctccccgccgttggatctgtacagcatgatccatttttccgcagtctgcacgggcatcgcaaaccgacgggcgagggagcgtttgcccacgccggcctcaatgagcctcagcgcctcgcgccggaactcgtcgtcatagtgcttcctccgatcctcacgcatacgaaagaaccacacctccaatcatcgaatccgaatttcttcagtccaataatcggggtgcggttcatttccgcgtaacccccttttttgagttctacagggttctcaggcgagaccggagagcctgttgatcagctccgggtctcgggtcgcacccttgtcggcggagcgggcgaaggccgcataggccttgagcgcctgggatactttgcgatcgcggtgcgccacgtagccgtctccggcttcgatttcggcgcgacgctgggccagctcatcatcggtcagctcgacgttcacagtacggttcggaatgtcgatggtgatgatgtcaccgttcttgatcagcgcgatcggtcccttgttcgccgcttcaggcgcgatgtggccgatggacaggcccgaggagccgccggaataacgaccgtcggtcaggagggccacttccttgccgatgcccttgcccttgacgaaggaagtcggatacagcatctcctgcatgcccggtccgcccttcggaccctcatagcgaatcaccagggccatgcctggcttcagcgtatcgttgaggatgacctcgatggcctcctcctgggattccacgaccagagccggtccacggaacgtccagatctccttcggcacgcctgcggtcttgaccacacagccgtcgggagcgaggttgccgcgcaacacggccaggccgccttcggtgaccgccggatggtcgatgtcatggatggcgccgttgacacggtcgcggtcgagcgaatcgaacagcgtggtgtgcgtccacggatcgggggagacgatgtggcccggagcggccttgtacatctgctgcgcctcctcggtgcaggagtcgcgcatgatgtcccaatcgttgagcttgtcttccagagtcttgtaatcgacggaatgcacgtcgcggtgcagcttgcccgcacggtcgagttcgccgaggatgccggtgatgccgcctgcgcggtgcacgtcggaaatctcccattcaccggacggcgaggccttgcagatgcacggcacggtatgcgagatgcgttcgatgtcgtcaagggtgaagtccacatcggcggactgggccatggcgaggatgtgcagcacggtgttggtggaaccgcccatggccacgtccatggtcatggcgttctcgaaggccttcttggtggcgatggaacgcggcaacacggtctcatcgtcctcgtcgtagtactgcttggcgatcttgatgatctgttcggcggcgcgcttgaacagatccttgcggtaggagtgggaggcgaggatggtgccgttgccgggaagcgccaggccgatggcttcggtcaggcagttcatcgaattggcggtgaacatgccggcgcaggagccgcaggtcgggcagacggtcttctcgtaggcgagcagggcctcttcgtccagattgtcgtcggcggaggcgtacatcacgtcgatcagatcggtgttcttcttcacggtgccgtcgggcagtacggtggtaccggcctccatcgggccgccggagacgaatacggtagggatgttcaggcgcaatgcggccatgagcatgcccggcacgaccttgtcgcagttcgggatgcagatcagggcgtcggcgcagtgcgcattcacctggtattccacggtgtcggcgatgatatcgcggctcggcagggagtaaagcatgccggtgtgacccatggcgatgccgtcgtcgacggccatcgtgttgaactcacgggggatgccgccggcctccttgatggcttcggaaatcagtcggccgaccttgttcaggtgcacatggcccggcaggaactcgtcgaaggagttggcaatggcgatgatcggcttgccaaagtccttgccgtccacgccggcggcacggtagagggcgcgtgcgcccgcgaatactcgtccattcatcagttttgcagatcgcatttccatgccttctattgtgctggccgaacgggacacgcgttttgtcaagagtcactatgtggaattttcataagcgttacattccccggacggcaaggcggctccgaatgccctgtgtggggattgcgtccgtccagctgcgcctctatacttacgagattggaaaagaagcttcgcgcttatctgatgattgggagataatcaactatggcattcggcactcagccaaccccgaccggacttgcggatccgccgatcgacgatctgatggagcatgcggactccaagtacgccttggctattttcgccgccaagcgtgctcgccagatcaattcctactttacccagctcaatgagggtctgctgcagaacgtcggcccgctggtggagtaccagaaccaggaaaagccgttgtccatcgcgttccgcgagatcaacgatggtctgctggaggagaccctcggcgaggacgacctgaccgaaggcaactgatttccaaggaatcgcgcctgatttattttctttcgccccgatacctgaacggagcgcatgagatgatggttgcaaaaccattgattgcgtcctgagggttggggcgttttctatattcgccattcacgacaacagacatccgggcggagttgggatgaccgccctaggaaaggagcagccggcatggctgaattgaagttgatttccgccgaatcggtgacggaaggacatccggacaaggtctgcgatcagatttccgatgcgattctcgacgatatgctgcgtcaggatccgcagtcgcatgtggccgtggaaacctgcgctaccaccggacagttcttcgtgttcggcgaggtgaccagcgagggatatagcgacatccagaacatcgtgcgtaccgtggtcaggaacatcggttacaccagttccagggtcggcctcgatgccgactcctgcggcgtgatggtctccctgaccgagcagagctccgaaatcaaccaaggtgtggcacgtctcgaccgtgagaaggagtccgcggcctcccgcgaagagcgctatgaggcgcagggagccggcgaccaaggcgtgatgttcggctacgcctgcgatgagaccgacgtgctcatgcccttgccgatctatctggcccaccgcctggcccatcgtctgaccgaagtgcgcaagagcggtgaagtggcgcacctgcgaccggacggcaaaactcaggtgaccatcgaatatgacgacgacgatcgtccggtccgtctcgataccgtgctggtctccacgcagcatgatcccgaagtggatcaggcttggctcaaggaacagctgactgaacatgtgattcgcccggtgcttgacgacgtgcttgccgatcgcgtgacgcacgatgaataccgtgtgctggtgaacccgaccggctcgttcgtacttggcggtccggccgcggatgcgggactgaccggacgcaagatcatcgtcgacacctatggtggcgcggcgcaccacggtggcggtgccttctccggcaaggatccgagcaaggtggatcgttccgcggcctatgcggcccgttgggtggccaagaacattgtggccgcaggccttgcccgcaaggtcgaggtgcaggtggcctacgccatcggcgtggccgatccggtatccatcaacgtggagacctatggtaccgaaatgggagtgacccgcgagcggattcagcaggcggtacgcaaggtattcgatctgcgtccggccgccatcatcgacgaacttgacctgaaacgcccgatttacgccaaaaccgccgcatatggtcacttcgggcgcgctgacgccgacttcacgtgggagatcgtcaacaaggtcgatgacctcaaggcggcgatcgccgagtagggcgaacgccgagagtacgtatgtcaaacgggtggctgcgttactcttggaatcatgacctttgaggatgccgagcagctggcgcttgacgggcttgccccgcgcaagcggcgcaaacgcatgcccgtagccaaaacgccggctgccgagcatcccgtggcccaagtggtgttggacgtgcaggccacgcatctgggacagaccttcgactactacgtcgaggagaaatattccgaggtggcccggcccggcgtgatggtgcgcgtgcgattcggaggccaacgcgtcaatggcattatctggaatcggacggatgtcagcgatactccggcgtccgcattgcgcttcatcgaccgtgtggtcaccgacggcgtgctggttccaaaggccatgcgcgaggacattacgttgatcgccgacgctttcgggggtacccgcgccaatattctgcgtcttgccgtgccgccgcgtgtggcacgagtggagcaggaacagcgacgaagcggatccacggcacgcgagggcagggcaagggcggaacgtctgctcgccgtggagcaggagcacttcgaccagctgaaggcccggtacggtggcgtcaacctgctacgggaggctctggaaggctcgcgttttcaatccttcgtattcgacacccttccgggattcgaccattggcgacgatgtgcggcatggatggtggccgccgcgctttcgcacaacagaccggccgtgatcgtgctgcctaccatgcgcgaaatcaacgatatgatcgaaaccctgcaatccatcggactgcgtgtgttcgcccaaaccaacgcctccagcggcggctacgacggtgacatggccgtgctgaatgcgcagatgccgcctgcggaacgatatcgtgcctatctggctgcgagcagtggacgggtgtcatgcatcatcggaacgcgggccgccatgtatgcgccggtggaaggtcgtgccctgtttctgatcgtggatgatgtgtgctatcaggatgccgacggcatgatgccttacgccaatgccagaggggtattgcgtctgcgtgccaaggcccatggcggagtattcgtggcgatggcgaatgcccgaagcgtgcagagccaatgggaaaccgatgccacacatgtgggggagacgccggtcagcggcttcagtacgccgattcatgcgcttccggcggtgactaaagaggcgagtccgtggattcgctggctcaaccgtgacgagttggcgcgtgtcgcggatccgaccatcggcgcccgtgtgccgcacacggccgtacgcgtgctgtccaaggcactggaaagcggtccggtgctgttgtccattccgcaggatggcatcaccgaggcgctgagttgctcgcaatgccaccgccaggcgcgatgtgcgcaatgcaccgggccactggaacgcttgcaggacggttcgattcgatgccgttggtgcggtgccgccaccgtgcaatggtcatgcccggcctgccataacgaacgtatgcgcgtggtgcgggtcggtgcggccggtaccgcgcaggaactgggcaaactgttccgtggcgtgccgatcgtgatatccacgccaagccagccacgaggcattgtgccggacattgcctttgcgccgcagctggtcatcgccacccccggcgccgaacctcgtgtgcgggggaccagcccgtacgagtgcgaatatcgggcggtggcgattctggatgcctggaccagcctgtatgcattcggcatcgatgcgggcgtggatacgctcaccgcctggatgcgtgcggtgtcgctgtgtgcgccacgggtcagggacggacaggcgttgctgcttggcgagaccgatccggtgctcgcccaatcattgatgttgtggaattcaccgcggttggcgcagaccgagcttgaagagcgtgcgcagacggccctgcccccggtgttcgcggcggcatgcgtatggggtcgccgaagtgcggtgaaaacggcgctggaacgaatcggcgctctgtcgggcggtgactgggccaccatcgaaaccgtggaaggtgtcatgccttcggtgctgggccccgtgccgattccgcagccacgcaccatcgatacccgtgagctggaggtgaccgccgaccgggtcaaggcgatcgtgcgtgtgccgcaaggcaaacgtgccgaactggccctgcggctgcgcaacgccagcgcaaggcatgtagccgcacgggaggcgggcgagcttcggttccaactcgatccgaaggaacgcatctaagcattccaaaagcgccttgtcgaaaccatttgtgaaggtcacgtcctctcgccgtgaaacactatggaagacctgaaggactccatcgaacatgaacggaggaacgcatgaaaggctggcctggagagcccgacatggaatacgacgtgctgatggccgacggcgaggcggccgccaacgcgggcaagccgatcaccgatgtgatcttcgatttcggcaatgtgctgatatattgggatccggccgcggtgatgacgccacgatacgacgatgagctcgtcgagcggttcctcgacaacgacatctcgggcttctacgacatcaacaacctgctggacggtggcatgtccaacgacgaaggcgtggcgctgatgcgtaagaccagtggcgaccagtgggccgacatgctgcagtactatcttgacaacttcgtcgattcactcacgggcgtcgtgcccggcgcccgtgtgctgatcaacgatttgaaggccgctggcatcggcgtctggggattgagcaattggcagaaggacctgttcccgattgcgctggaacactacgatatcctgcagacgctgaacgatcgcgtggtttccggctacgtcgagctgcgcaagccgcacaaagacatctatgagcatgcgttggaccggttcggcatcaatgccgcaggtgcgatgttcgtggacgacaaggcgatgaacatcgtcggggcgaacgaggccggcattcgtggtgtgcgattcaaggattcgcgtgccctgcgcaggttgctaatcgccaacggcgtcgatattcccgccgtactgcaggcgtgacgttcgcgatcgtcgcggcatcgatcccgcgacgtcgatgatggtttgtgattgagatgtggacaaggagtctgattcatgctgaaagtgcttttcgccggttctccggaagtcgccgtaccgtcgctgaggatgcttgccgaagataccgagcattttgaggtagtggccgtactcacccgtccggacgcaccgaccggccgcggacgcaagctcgtaccgaatccggtcaagcaggccgcgctggaattgggattgccagtcatcgaatccgatccgagcgaagagaccttcatcaacgaactcacggccaccggcgcacaggccgccgccgtggtggcctacggcaagatcctcaagcaggaggtcttggacgccttgcccatgggctggtacaacctgcatttctcgctgttgccgcaatggcgtggcgccgctccggtgcagcgttccatctgggcaggggacactttgaccggcgccacggtgttccgcatcgtcaggaagatggatgcaggcccgattctggcgcaatccaccgtggaaatcggtgcgcacgaaacctccggcgaactgctgaaccgtttggctgaagatggctcccgattgctggccgcttcgctgcaggccttggccgatgatcagatcgcgccggtcgaacagcccgcaggcgcctatgaaatcgcccagaagattaccgttgaggatgcgcgcattcgcttcgacgttcctgcgttcgccgtcgaccggcagattcgtgcctgcactccgaatcctggcgcctggtgcgaactgcatgccagcgctgacgccgagccgaccaccctgcatgtgttgcgtgcgcagacgtccgacatggacaatccgaatgtgcccgccacgctcgaaccgggacgaatcgtggcaggcaagaagcatgtgtggatcggcaccgccacccagccgttggagctgctcgaagtcaaggctcagggcaaaaaggccatgcgtgccgctgactgggcccgtggagcccgcctcgacgggacggctttctgtaggtaacagtcggctatggcgtccgcagtgacggacggcatgcattgacgacacgctccgggccgttcgggacaagtctttacggctctttacggccttacagcgcatgccaatccgccacctgccgtacgtgcggatgctacgtcattccgcaagccgcgcagttgcgacgggtacgcgcagcggaggggctatctgagaaaatcgaggatcttgatgaggtcacgttcgttcagacggtgcggagcctcctgctggaccttcggtttggcgcagaatgccacgcccaatcccgccgcatgaatcatcggcagatcgttggctccgtcgcccacagccacggtttgcgccatgctgactcccattcggccggcccatgtgcgcaatgattccagcttgacgtccttggtgacgatatcgccaaggacgcggcccgtcagcctgccatcggcggtttcgagacggttcgcggtccagtaatcgatgtttgcgtcggatgcgagacgatccacgacttcatggaatcctccggagacgacgccgaccttccagccatagtcgtgcaacgcatcgatgagggcaagcgcgccgttcgtgaaatggacggcatggtagacatcgtcgaacatcgaaatcggcaagtccttcagcaatgcgacgcgggcacgcaacgcatcgcggaaatccaattcgccgttcatcgcacgggcggtgacggatgcgattcgatcaccgacgccggcggcgacgccgagctcgtcgatgacctcttcgtcaatcaacgtggaatccacatccattaccagcagtccggggtgggacaacgtgggcacggtggcggcattcagcgtttcttcttcaagcatggtttcgattgtcggaaagcattaggacaatgggtattctggacggtgaatcgaagaaagcgagggtcggcatggaacggcaggatgagaggttgcggtccctcagtgaggccaatgaccggctgatggccaagaaccatgcgttggcgaaggcattgacccgtgccacgcaagaactcaccaaggccaaggcgcaactgaatcagttggccgggccccccatgactttcgccaccatgatacgcgtgcatgcggcgaacaccgacgaacagggggtgcagcacgccagcgccgaggtgatttcgggcacgcggcgcatgatcgtgccggtggcggcgaacgtacaggcgtcgcggctggaggcgggacgtacggtgctgctcaacgagaacatggtgatagtggatcagcatgacaccgacaccttgggttcggtgcgcaccgtcagacaggttcttgacgacggtcgtctgctggtggccgacagtggaggcaacgtcacgttggtacgccgtgccggcacactcgccaaggagaacgtcaataccggcgatcgggtgagcgtggattcctccgtccgcttcgcgctgaccctgattcccgtcgaggatgacgccgatctggtgcttgaggagactccggacgtcaccttcgacgacatcggcggtctggacgaacagatcgagcgcatccgtgacgccgtgcagatgccgttcctgcaccgtgagctgttcgaacgctatgatctgaaaccgccgaaaggggtgttgctgtacggcccgcccggcaacggcaagacgctgatcgccaaggccgtggcaaacgcgctcgccgaaggttccggcgcggggtcgggcgtgttcctttccgtgaaggggccggagctgctcaacaagttcgtcggtgagtcggaacgtctgattcgcatgattttcagacgtgcgcgcgaacgcgccgccgacggcaggccggtcatcgtgttcatcgacgagatggattcgttgctgcgcactcgcggttccggcgtgtcctccgacgtggaaaccaccattgtgccgcagttcctctccgaactcgacggtgtggaaagccttgacaatgtgatggtgatcggagcctccaaccgcatcgatatgatcgatccggccgtgttgcgtccgggtcgactggatgtgaaaatccgtgtggaacgtccgaaagcgaagcaggccgagcagatcatccgccactatctgaccgacgacctgccgctcacgccgggcatcgaggcgaaggccctaaccagcgtgctcgtcgccgacatctatgcggtcagcgagcatcgccacctatgcgacgtctgcgacgaacacgggcagtggtcgccggtctatctggccgacgtggtttccggagcggtattgaagaacgttgtggatcgcgccaagacaaaggccgtcaaaatctccatcgaatcgtcggagcccgcggcgatcggcgtgaatctgctggcgaaggccgtgcaggaggaattcgaagagacccgtgacgccgtgctggacgccgatccggtgcagtggagtcgaatcaacggattcgaggccgggcatgtgacacgcatcaggccgacggcgcaataaccggatcggatcggccggtatagggcagaggaaaggaatcgggagatgagcgttcgtcgagtaatgggaaccgaaaccgagtatgcggtttccagtcgtgggcaaggccggtacaatccggtgcagctatcattcgatgtggtcggcgccgccgcggatgaacgcacgaagcatatccgctgggactatcggcaggaagatcccgtcaacgacgcccgcggcacccgtctggaacgcgcctgcgcacatcccgacctgctcaccgacgcgccacagctcaacatcaccaacgtgatcgcagccaatggcggacgcatatatgtcgaccacgcgcatccggaatactccgcgccggaaaccacggaccccttcgaggcggtgctctacgaccacgccggtgatctgatcatgcagcaggccgcgcagaaggcgagcggcatcacgggccgcgccatcatgctgcatcgcaacaacgtggacggcaaaggcgccagttggggcacgcatgaaaactatatgatgctgcgtgcggtgccgttcgagcatgtgacacggctgatgaccgcgcatttcgtttcgcggcagatctatacaggctccggtcgcgtcggcctgggggagcgcagcgagcgcgccggctaccagctcagccagcgcgccgactacttccacatgaaagtgggactgcagaccaccttcgaccggcccatcatcaacacccgtgacgaatcgcacagcaccgatgcataccgtcgattgcacgtgatcgtgggcgacgccaaccgtatggacgtgccgcaggcgctgaaactcggcaccaccagcatgctgctgtgggtgctcgagcatggcagggaggcgggactcgatctggaggcgatgatggacgcgctggcgctcgccgatccggtggaggccatgcataccgtctcgcacgacctgacgttgaatgccgaactgccgttgcgcaacggcggcatgaccacggcatggcagatgcaggtcaccttgcggagcatggtgtatgcggcggccgcgatggtctacggcagcgacacggtgggagaacccgtctggccggaccgttccacgcgcaacatcatggtgatgtggggtcaggcgctcgccgacgtggctgccatccgccatgccgacgacgatcggcgtctggccatgcgcgaagaggcaggccgcatcgaatggctgctcaaatggcggctgctggagaaactgcgccgtaaaaccggttccgattgggccgacccacgtttggccgccgtcgatctgagatgggccgcgttggattcctcggattcgatattcatgaaactgacgccccagatggagcggctggtcgatgatgcgcaattgaggcgggcaatctcggaaccaccaagcgatacgcgtgcctggctgcgcgcgcagatgatccggcgttttcccgaacagacggtggccgcatcctggtctcatctgaccgttcgcagtgagatgagtggtgatgaatccgtggagaatgccatgacgtcattggatatgtcggaccctttggactttggcgaatcccaatgtctgcgagccttcgagggggcatcggacgcgcagacggtcatgaaccgcttacgctgaacatcacgtcggtcgcgtactattcgtgatgatggtataaccatgccaggcaacaggaacacagaaacaggccctgatatcaggagagaacatatcgggcgcgcagtatgacgaatgaaaaggcataatctatggagttgaggcaagcggccctcgaagtggcccgtattctgcaggatgcaggcaaacacgcattgaacgatcagaccaatccgcgcgatatgaaaagtcttgagctgtcggacgaccacctgcatttcacgtcggatctcgacaagcgtctcgcacagttcatcagcaaccgcatcacctatgtcgacgtattcgatggattttggcagttccgccccgaagaatgccatccgggggaacggtactggtgcgtcggcggcatcgacggcgtgatcaatttcgcccacgacatgccggagtgggccatcaccgtgaccttgttcgaatttaacgagcagtgctccgcacagccgattctcgcggtggtgcatgccccggcgttgggtttgacgtatcttgccgtccgtggctccggtgccattcgtatccgtcgcaccccgttgggcgacaagcgcgagaagatcatcccctccaccacaccgtcattggacggggccgtggtgagtttcggcatgtcgtacgtgccggcggaatccaagcgatcacttgacgtggtggcgcgcatcgccggacgtccggccgacatcaagcgcgtggggccggtgtcgctggatctgtgcaaggtggctgacggcacgtatgacacctatttcgagccgcatctgcataaatgggatgttcccgccgtgtcggccggtgccatgatggtctgggaggcgcaaggtcacctgagccaatggaatggcgacggcgttcactggcgtcaggaaaacgacgtggtcgccaccaacggactcatcaacgacgatttacgtcagtatttggtatagcgccatagggcctgtctctcatggcctcatgtgtggcgcagtcggcgccgttgcgattggtgcaatcgctggcggatgccgaacgtatcgaaagggaaagccatgcctcaggaattcgaacagatccgatccgcggaccagccgttggacagcgaggagagcgctccggtcgccggtgcgcgaacggatgataccgtggatgccttggatgccgtgctggatgatatcgaatccgtattggaaaccaacgccgaagaatatgtcggcagttttgtgcaaaaaggcggcgagtgatgccccagctgcgcgacagcggcaatcattcgacggccccgcttgacggcaggacccgcggtgaggtcgacgcgttcatccgcatcttcggcatcgaaaccgagtatggagtcagcgtgaccggagccgatgcgccctgtgatgcggggcagacggccatgatgatgttccagccgatcgtggcccaggccagatcgacgaacacttacatcgaaaacggttcgagactctatcttgatgttggttcgcatccggaatacgccacggcggaagcccgggatcccatggatgcgttggcgcttgacgcggccggcgagctggtgatgcgcgatcttgccatggacgcccagcacaggttgcgggaaggtcatggcaggcgtgccatcgtgcatgtgttcaagaacaacgccgattcggccggtcattccttcggttgccatgaaaattatctggtgcggcgtttcgtgccgttggaggccatcgaagatgagttgttgccattcctgatcacccggcagatattcaccggtgccggtcgtgtgggcgggcaaggcttccagatcacgcaacgtgccgattttctggatgaggccgtgtcttcggccaccacgcgctcgcgcccgatggtgaacacgcgcgacgaaccacatgccgatccggacgcgttccgtcgtctgcatgtgatcatcggcgattccaaccggtcccagtgggctacgatgatgaaactcgccaccacgcatctggtgttgtgcgtcatcgaacaggcggggcgtgaggggcgtgaatccggattcgcacggttcgccttcgccgaccccggcgcggcgaatcatgccgtcagtcgcgatgcgagcggcgtcggtgcggtctttgacatggccgatggcgatgtgattcgcggtggtgcggtcgccgtgcaggaacgatatctggcggcggtggaacgtttcgtcgaagatcatcccgaagtcggggcctcgttgcctcgtaccgatgtacatgatgtgatcgctcaatggcatgaggcgttggaagcgtttcgttccggtgacgtcgacgctttggccgatagggtggattgggtgtgcaagaagcgcttgttcgatgccttgcaggctcgtaccggccatcttccggcaagcagactcgagcagttggacatggactatcacgatgtggccaacggtaccatatatgcttcgctgtgccgccgtggcggcatgcgcacgttgttggggcgggatgcggcggatcgtgccgtccacatgcctcctgacgatacccgtgcggctttacggggcagattcgtgcgggaggcgaaggcgaagggtgcccggtattcctgtgattggaccagactcacgttgatgtcgccccaccattcggaaacggtgttgcttgatcccttcgatttcgaggaatcggagcggttccggcagatgatggatatgctggcctgagttcaagccggagggggtatgcgcctgatccggcatcctgactgatgcgaggagggaaggttcaggcttcgccgcggtatttggccatcatctgcgactgcatctgttgggcgcttggcggcgtccaggtgatggcatcggctccggcgtcgatggtggcgagaatacgttcctcggagccgcctccggaagccaggatcggaatttccggatggtgctctcgaatgctggagaccacctgtgcggttcgtgcgcccgccgcgacgttgatgatggcggcacctgcgatgattttgcattcggtgacttcgtcatcttcggtaacggtggcgatgaccggaatgtcgatcatggacatggtggtttcgatggtttccgccggagcgggggcgttgatgaccacacctgctgcgccctgcatctccgccaccatggccaattcggccacacgcgggccggtggtggttccaccgcccacgcctacgaacaacggcatctgggccaccgtcagcaatgcctgcgtgatcaccggctccccggtgaacggatacaccgccagaatggcgttggcgttggtattgcgaatgatcactgcatcggtagtataggcgaaggatttgagcgtatgccccttcaccgtgatgccgccgcaccgttgcgcgatgatttccggcacgcgagcgcttggagaggtcaatcgtccttcgacgatggcggtgccatacgcggtgcgggacacatatggcgtggcggaatgctgttccacggcgacatccgcgcttggcgtgaacaacgaacgtttgctgatggggataagagccggatcattcggctccggagtgcctgcttgatcgatgctcattcctgtgcctccgtacctgaacgatcgagcatgagaaactcatgaatggctttgcgtcgttcggtgatctcctcgtccagaagtctggtatcggtgttgtcgatgatacgctgcaggtattcgctgagagtggaaagttcatcgggattcaggcagtcgaacatgcgcagggccgattcggtctgctccttgatggggcgcatgaggggtcttccgcgacgtgccgcatcgacgtttctgaccgttgccgccgcgcgacgtgccgttctggccctggtcgccttgagtttggaatgcagtagcaggatgttgagctcatggagctgattgattacgatcttcctctggtcggccatggcggttcctgtctatatggacacgatgtctaatatgtaaagtctatctggaaaatcaggaaacgcaacccgtcgctgcaatgtcgtgaaacgactggggccccgaccatcatggtcggggccccagtcgccaatggaatcagagactcacttggtgacggccttcttcagcagggaaccggcggagatacgaacaccgtaggttgccgggatctcgatggtctcgccggtgcgcgggttgcggccggtacgagcggcacgcttgacgcgctcggcggagaacagaccggtcagcttcaggccttcgccggactgcattgcctcgacgaacacgtcctggaaagcgttcacagctgcctcagcctgtgccttggtcaggttggacttctgagcgatcttcgagacgagatcagacttgttgtatgccataaagcatccttcttgggtcaggggacatcctgattactctgatgtccacgttcattacgatattagcgcaccttaccgccgaaaaccgcattctataagggttttggcgagattttttagaaaaacggaccaaaatgaccggtcacgaatcgattctaaatcagattatgcctgtcaagccacttcatggccaacgcaccgaccgggatccgtagccagtagaaggcaattcggtagacgagagtagcggagacggcgatcgtggaaggaacccctacggcggtgaacgccacggacaaagccgcttcgaccgcacccaagccgcccggtgtcggcactgcggaaccgagcgtgttcgccaagagaaaaataaaggtcgtttccacgggattcgtatggtatccgaatgccagcaacgcggcccagaatcccaaaccggtaccgatattgagaatgagtgcgcccacgatgccgaaaagcagttccttcggcctggtaagcacatccaccagattgcgcgcatacgacatgacgatcggcagatacttgtccgtgaccagatgacgcaccggcggaatcgccatgcccgcagacacgatcagtgcaacgatggcgattaccatgatcaacgtattggtgggaatcatgccggaaagcgtgttacggccggtgaatacgccgatgaccaacagcaacactatcgtagtggcgccctgcaccgcccagacggcactcatgatggcggtcgccttggtattgcgatagccgcttttgcgcaggaactgcagattgacgaatgccggacctacgcccgcgggcatggaaaccgcggtgaatcctgcggccatctgcgaacacatcagaccgatgggattgcgcttgtcggcatccatgaatccgcccagcgtcatggcggaaccgaaccaagccacgaacccgagagccacgcagaccaacgccatggcgagattcgcctctttgacggccttgatcatctcacccggctgaacctgcgtgaacacgacgtacacggccactaccagcagtgcgatggcgatgaacgaacggaaactgaatctcgaaagcgtgaccttttccatggaatcggccatttcctgcggagcgagggcggagatgcggtcgcgaagccgcaccagcaattgcttgtcccatccaggcagggcgcgagtggcggcaggggcggcggccttctgcacgaacggggccagatcgatgagccgatcgtcgccccatgtccgacgggcgcaggccatggcacgatccacgccattcagcgcgctcagcacaatcagcagctgcaccttgtcgagcgcgaaatttggcgcactgctgccgtagtcgccattctgccagccggcgatcaccggagtgccgtcctccatgcgcgaaagcgtgttcggcgtgatgcgacggtgggtaaagccatggcggtgggccttgtccagatacgccatgaactgttccatgtcactgtcgctcatggtattgagattgcattccaaaggcatgcggccggaacggaacaccagaatcgaggattcgccgttgtcggccacgccatagacccccggcgcgacgagaccggcgttatgcagtcccagcaacatggcgtaatgatgatggatggcgtcgatggaggaacggtcccggcgcatggacacgccggtcagccgaatccattgccacagctgattgagatatccggcgacatgcacctgattgtcgagcacggatacgatgaaacggtcgccgttggcgtcaacggcatcgtagatgcgggagttttcgatgagatcgtcatcgagaatggcctgcagcatgcccgaatcggcaccggaatcgagacggcgtgacagagaagcgacatcgatgccgatggaacgcaacgactgcaccacctgcgaaccccatgctccgttggtctgcgtaccgatggcgaaacgaatcagcatgccgatgatacggccgaccgcgaacgagaccagcactccggctacggaattccacgacagcaccaccaacagcaccgccacggtatagaggacgttccatccccatttcacggcggatcgtgtgcgtcttgggcccgcggcggtaaggaacgcggccatggccgcatagaaatcaggaagcagaccggtgccggtaaccgtgccgttggaaaacagggaggcgatcagcagcgtattgcgagtgccggtaatcagtgcagacacgccccagacagcggagaatccaagaatcaacgcgatggccgaggtcacgctctgcagccactccttggcaatcagcagctgcagcagtacgctgacggcaatgaacacgatggccagttgctgcagcagggaagccggcacgtccataagccagctcaccgcgtgactggccgagcgcacgtccgactcgacgccggaggccgtgccatgcaggtagatcgagaacaggatgaccaccactgcgatgatcaatgcgaatccggcgtgcaacagatctgcgaaatcccggctacgacgcggcggaatatcatcgatgcgcacttcatgcttgctggcggcgggggcgtgagacactatgacatgctccatacatacggttagacaaagacggtgactgctgccgtcatcgctttcgatgatacaacttggggcggctgcgggggaaacgcaaccgccccaagaggcttatgaccgtacgtgaaccggatcagcgggcgaaatcgaccagtcgagaggccacaccggtatacgtggccggagtcagtgccttcagacgtgccgcagtggcctcgtcgaaggactgctcgtcgatgaacctctcgacggcatcctgggagatttcatggccgcgcatcagttccttgactttctcatagggcttgtccatgcccggcaggccggccagctcgcaggcgcgcatggcggtctggatcggctcgcccagcacttcccagttggcgtcaagctcggcctggatggcgatgtcgttcggatggatggaattcagtccgcccatcagattgttcagtgccagtacggagtaacccagggccgaaccgatgttgcgctgcgtggtggagtcggtcagatcgcgctgccagcgggattcgaccagtgtggcggacagggtgtcgagcagcgagcaggagatctccagattggcctcggcgttctcgaagcggatcggattgaccttatggggcatggtggaggagcctgtggcacccttgaccgggacctgggcaaacacgccacgggagatgtacatccacacgtccacgcacagattgtgcaggatacggttggtgtggctgatggtaccgtacagctcagcctgccagtcgtgggattcgatctgcgtagtcagcggattccaggtcaggcccatgcggttggtcacgaactcgcgggacacggcaacccaatccacatccgggcaggccgccagatgggctccgaacgtaccggtcgcaccattgatcttgccgaggtattcctgattcctgaccttgttgagctgacggctcaggcggtacacgtacaccgcaagttccttgcccaacgtggtcggtgtggccggctggccgtgggtcagcgacagcatggccttgtcacggtattcctcggccttttccgccagatggtcgacgatggcctgcgcgcccggcagccatacgttctcgataccgtttttcacgcaacgggcaatggacaggttgttgatgtcctcggacgtgcaggcgaaatgcaccaaggtcttgagttcggtgagctgcgtctcgtgaccgagtgcttctgccgccttgtcgagctgatcgtcgatgtaatactcgacggccttcacgtcatggtgggtcacggcctcatgggcggcatgctgggcgatgccttcggcgccgaaatcctccggaatggcgcgcaaaaacgcctgctcctcatcggtaagcggcttgataccgggaacgatggtcttgaaaccgttgccttcgaaaccattggcaagcagaatcatccattcgacttccacgcgcatgcgctcgcggttgagcgcaggttcgctcagatactcgacgaggggggcggtctgctgatgatagcggccatcgaggggggtcagggcaattgcaggggagatgtcagtaagattcatgttgtacagcatacttttagccgtaaacgagattccgtcggtgtccgctcgccggttgccgatgacacgcccgcgaggagctcacttgctcatgcggccttgccagtaggtgacttcctccagatcgccgtcgatgacgttgcggaaatgccgttcgtggttttccagggcggccgatcccatatcggaggcattccgataggctgcctgatggtatttgagccaatgggtgatttccttggtgtcgggcgcatcctgcacttcggtaccggtgaagagagagccgtcgtcagaggtctggctgaccgtgccccgtacggtgagccagtgttcggtattcggattgaccgcgccgtccaaggctgcgaccagttcgtcatccatttccacgctggtgacccatgtgctttcgggaatcggatggttggccacgggggaaccggcggtcaccacatgttcgatgtcgtatgcatccttgaggtccgaagcaagcgtggccgcaacgatgccgccttgggaatgaccgatcatcgccaccggttcgtccggaccgatgcctgcccgttccatggcttcggctaccatgcgggcactatcggcctgcatgcgttgctgggaatccgaactcatgagttccacgttctgcggccatccgaacggcgaatccggtttgccgtcggttccgggaatcgtgaccagccaggcgttggatccatcttttctgcggtatttggaaatggctatggtgccgtagtccaagccgctgccaagatcgattgtgccgaggcgttcttcggcaagccgccgcagatcctccatggaatcggccacactgtgcgattcgcgcaccacggtggcattggcatgcacttgggtgacgctgagctcattgccttgaatgaggtcatatccgggtgccgtgaccttggcgatgcgtttggccgcgatattgacctcatcggtatggaagagcccgcgcaatccgccgagacctgcaatggcggaaccggcgccgctcatcagtccttcctgcgcccagtccagcgaatccaatgcatggattccattggggtcgccttctttcgccgagccaaagacaaagcctccgagcgaaaggaggccggccgctgcaagcgactccttcgggaatgtggtaaccgtggcttggagcaattcattgagtatgcgccggttgcggtcatccgcctgggcatacagggagtgcgccctgatgaccaaatcggcgagccatgtgagcttttccgccatgacgttacaggcgcttgcatgttcggcgcaacgtttgatgatccgatcgtaggggaacgatacatggtcgtccccgttgcagatgatgccgtttccgccgagcgctgcggcgaagggcgtgccgtaacgctgggcttgaagctgcagtaccgttgcattccatgtgttcgacatgaccgcatatgttcgggaagcgtccgacagggcggtggcgacgccaagatattggttgtagtcggcggtcgaatacctgcgacctccgctgatggtggatgtgacctgccaactcatgccgcacctaccgaccacagcgtacgtgaagtggttcgcaacgcttccttcagggtggtggataggcgatgcagttccgtaagttgactacgggaggattccgctgcggtaccgttccaatccgtcaactcgctgcgtgcaagcgtggactcaagctggtcgaggcccgcgctgcatgatctgattcgcatatcgacaagattctgactgatccgtatgccggtgcggcaccggcatgttgtaccgggcggagcgacggaccccatcggcaacagaggattagcgaccgtgccggatgcgctgtatgcaagtgatgtgttcatggtgtcattgaacacgtatgcacgatgaggagtgcaggaaaaatggggtcggtggtcgaaggacgcgaaaaaaacacgatgccggcgtgtcatcgttgaaaagacaacggaaacgcgccggcaatgcggtggataagtcaattccgaccggattccgtcaccatggtttggtctgggtcgaagatgaatccgaatcctggttggcggccgaacccttggatgattcatcactcgaatcaggcgaagtggattgcgtgttctgctgaaggagttcctccaccttcttgcgttgttcctcggtcaggttgccgccgctttgctgtttgtccgtatcgttctgcgaggactcgttctggacgtttgtgtcggaattctgaggatcgctcgttgccttgattgttttgagcgtgcgtttggtcaattgctcggataccgcactgttatgcttgatcgcctcacgcagctgcggcagcagcagcgccccgacggaagcggcatcccggaattgcgcgtccgtttgctgttgttgcgcgttcagtttgtcgaggtcgggagtctgcgactgactggtcttgatgttttcaatcagactttgcgtggcctggttgtactggtttgcggccacgagattcacgacggccagcgccgcgacggcgaccaacgccacggcgatgacgatcagtgcgacgcgtaccggcaatgaggcgcgcgccttacgcggggatgatgcattcatagcaacctccttgatgacgccagccatgcgccgagctcacaggataacaagaatgccaccgcaatcgcgaatggccagaccaagggagtgacacgtgttcgctgcttggcggtctgcgagatgcgccattggctcgaggcttctttcgacatgccggaactcatggtgttcgaggcgttcagttgcagggcggtaccgctgagctcgtcggcgatggtcttcatggtatccgcattcatgcgggatatgcccggctggccggtttccggatcggtgacccattgctgatcggtttcgcccacgccatcgaccgtgacgggaatctggcctccttgttcgctaccgaccgccacggtgaacgcatcgttgagatatcgtcgcagtgaggagaaggtgcgtcgggttttcgaggaggtctgttcgccatcggagatcagatacatcacgatggcatcatcgggatgttgctcatgaattgacttgcaggtcagcaacagctgatcgatcggaacgtcaagcgtggagccggatgaaacggaggtcgcctccggggcgagggtgtcggcccaattgtcgatcgccttggaatcaggggtcaatggaacatccaacgtaccgctggcgccgaaacgcaccgcggcgaaactggaattcgggtacaggccggtgatgtccttcaccgcctgcttggccacatccaatcgggtttgcagctcgtcggaaccatattgcgcatccttgaccgccatggagccggtcacgtcgacggcgatcaccacatcggtggcgttgatcgcacggttatgcgtggacgatacgatgctgggcgtcaggatcatgaccgcaaccagcaggcagatcagggtacgtcgcgtgcaggcccatacggtttcgtcgctgtcggcgcgccgccttatgtgcagcatgacctcgattatggcggccgccagcatgacggcggccaatacgccgcccgccggccatcccagcgccggtgagaaagtcagatcgttcatcgtctcaacctccatgcgagcgccagccagatgatcgtcaatacggccagggccaacgtccaccagccgggagcgtcgacgagtgaggccttgctgttcgccgcattctcatggcttcggcgtgaatcgatctgtttgaccagttcggccacggatgagccgccggattgcgtcaggaacacgcctccgtgcgcttcgatttcggatttgaatgcggaggtcgtctcgtcgccttcgctttgcttcggcccggagaacaggccgtccacggtgattttcgcctcggaggtcagttgcagggcctcattcagggtgtagatgggcgttccggacacgacgttgtcggtggccagcacgatggaggccgcacgctgacgggccgcattgtccgcattggcctgaccataagcgaaaccgggcagcatcgcggcgcagctgaccacaccgtcgcctatcagcgacgtggcttccttgcggttctgcgttccctccagccaatcggagatcttctggtagtcgctgtccttcatcttatcgatatcgtcctgtgattcgacgcccttgaggatcttgctggcctcggcaagctgcttggaaaccagctcatagtcgtcggtcaacgggaacacggtccgcgatgtcgaattgaagatgctcagaccaatgcgttcacctttgaaattgcttaccagcttgcggtaggtatcgatgacctcgcgatcgtagggaagcgtggaaccggatacgtcaaggcacagcacgatgtcacggctgccggcgcgttcctcaccctcgtcgacctggctcggtctggcgaccagggctacggaaacgaccaaggacagcgtcagcagcactgctgccaggcgagacaacgtgcgccacaggcggaaaaggcgggaggccgtttccgtgttgagatcgtcatccaagctgaacgaacgagcggcgtcgatgccatgcctctgcgcatgcgaggccaccaacatcaagacggcgatgacggcgatggcgccgatgacgcccgcgacggcggcccaaggccaatgccatgacagttccatctaccgccacctttccacaagattggccacccattccccggcctgttccaccgttgcctcacgtgcgatgccgttgttcgcggcatcggcgaattcgggcggatacaacgcctcgatggtttgacgaagcaacgtgatgccctcctgattaccggtggtgcgcggagcggcgtcgatgtcggcgagcgtgcggttgcggatgtcgacgccggtgacggtcgaaacgtagtcccgggacaaggccgccagctcggcaaacgcgtcctcacggctgatttcgcccctatcatgacgggtcacgatgtcatcgatccgttgtctccacagcgccctgtccgtcaattcgtcatgccgaccgcgaggttgtcgacgtgcggtctttcggcccggacgggacagccatatggccgcggccaccgtcatcgcggccagaaccaggcagatgaccagcgtcacgatcagcggcatctgcaggtcgatcaggcccaacggcttcaagtcggtttcggacaaatggagcgtcatgacttccctcccgacgataggcgtgcgggggagcgtagcgggttatgcgaagacccggccaaggccatggaaaccatgtgcacgaattcgccgaacatgcgctcgctggatccggcatgaatcaccgtggacccgcaacgattcaactcccggcgcacggccgcggcgagatacccgcgatgcgtacgcacctcctgcgccgttgtgcggttgcgcaggaatgcggggacacggcgagggccgttgccgtcgaagacatgcgtaaaacgtccatattcgaacgggttgatggtggctacgtcgataagcaccatgggatgcgtacgcgcaatgcgtcttatggcttcgatatggcgctcctgtagggcgtgctcatcggtggcaagcaccaccagcgcttcgcggtcacgaatgcgacgcgcgtattccagcagcgcgtcgatattgcgcggattggaccaatcacgttccaatgcctgatccagcgtctgttcgaattgtgcgaagcccccgttgaaaggtatccgcgtgatcgaagcggagtcgccgaagaccacggacacttcgtcgccacgacgcagactcaacgcggcgaacatgcacagcgcattggctgcgacctgatacgcctgttcccccgaagggcaggtgccggtcatctcctggccgacatccagcaacagccatgcacgggaagtcgacggacgttccctgagcaccaccattgggcggccgacgcgggcgctggtcttccaatcgatctgtcgagcctcgtcgccggcctcgtagacgcggatgtccatcacatcatccgatccgaagcgtttgttcgaggcgtgggcaccctccagcacacccagcgccttgcgaacggtaggcaggctcaacgtggttccgagggcttcgatctttcttcggatcggattgtcggaacggttctgatcgatcatggaacgggaaccgcctgcacgatcgaatcgacgacctgatcgctgttcacaccgtcggccagagcctcgaacgtaagaatgatgcgatggcgaagtacctcgtgggcgaaggccttgacatcttccggcaccacatagtcgcgaccctgcaacagcgcattggcctggccgatgcgggtcagggcaatggaggcgcgcggcgaggcgccgaggcgtaccaacgaggacagtccctgcaccggatgcgatcctgcgccgcgggaggtcgccgcgatatcgacggcatactgcatgatcgcgtcggacacatgtacgcgacgggcgcatgaacgcaggaactccgcgtcgctgatggaaatgacctcggaggtgatggccctcggatcgaaggtgtcggaaccgcgacgagtgagcatggcgagcatgcgctgctcctcctgaacgctcggataggtcatgacggccttcatcatgaaacgatccatctgggcttcgggaagattgaacgtgccttcctcctcgatggggttctgcgtggcgatgaccatgaacggcttcggcagcgcgatacgctggccgccgatggtagtggcgccttcggccatggcttccagcatggccgactgggttttcgcgttggaacggttgatttcgtccagcagtacgaaattcgcgtgaatcggaccgatctgcgtggcgaatcgttgtgtggagaaatcaaacacctgcgtgccgatcagatcggatggcatcagatccggtgtgcactgtacgcgcttgaacgtacccgacacggaggtggccaaggtctgagcagccgtggtcttggcaagacccggcaccgattcgatgaggatatggccgccggccaccagcgtggtgatcagggattcgcgcagattctcctggccgaccagggtctgggcgaatcgggcgcgaatctgcgaacccaactttttcgcgcggttgatgtcttctgcggatagtgcgactgtggtcggtgcagtcggggccggaaccggcgccgactggggaacctgcggttttggagggaataaagccatgccatctactgtaactggttaagctgacggcaaagaccaatcgacgggcgaggatcccatcgaagtcagcgccgcgttggcgcgagagaacggcttcgagccgaagaatccataacgtgccgacatcggacttggatggggagatttgatgatgaaggcattcgtgagcaacggctccaacgtctgcgcattgcgaccccagagtatggcgacgaggggcttgggggtgccgtccgcgttcgtcctcgcgttcaacgcgcggatcgccgcttcggtgacgggctcccaacctttgccctggtggctgttcggatggccgacccccacggtcaggcacctgttgagcagcatgacgccctgcccggtccacggtgtcaggtcgccgttggccggcatgggcaggccaaggtcgtcggtcagctccttatagatgttggtgaggcttcggggaatcggcctgacatcgggggccacgcagaaactcaggccgaccggatggcccggggtggggtagggatcctgaccgacgatcagcaccttgatgtcgtcgaacggaatggtgaatgcacgcagaatgttcttgctggcgggcaggtaggggcggcctgcggcgatctctcccctgaggaaatcgcccatgcgatgcacctgcggctccacatcggacagcgccgtggcccaaccgggctcgataagttcggataacggcttgatatgagcttgagtcatgggtattactgtacgacccatggtacgaccttgtacgcctatgtcgtgcgtgcatggctggggcacgcgacgcgaattggccgctgactgcagtggtcagtacactttcagtgtaagtgtgcgagaaatgaggtcgtaagatggctcaacaggacaaggaaacctatgattcctatgccaaggatgcattcgacaatcccccggcggggccgatgggcgtccaccggggtgcgcgatcggccgcatcccgtgccatgccgtacgtcatagtggtcgtggtggcattgctcgccggtctgctgttctggggaatctattccggtgaaatcggcaaggtaaagatgccgtggtcatcgtcgcaggcaagctcgtcacagaccgcatccaccaagaagacggctacggccgaagcgcagtccagtgatacggccaccgccacgcagactccggacgccacgggggaggcgagcgatacggcgtcaccgaccgagtccgcaacgccggagcagatcgtgaacaaggacacccagatccgtgtgatcaatgccacgaacgtcaccggttacgcacaaagcaaggcgaacgagctgaccaacgccggatatacgagtgtgacccccagcaacccgaccggtacggttcccacgcagaccgtggtctggtaccagaacgaaaccgacaaggcaaccgccgaagatgtcgcccagacgctgggaatcaccaatgtcgagcagagtgacggattggtcaccccgattgtggtggtgctgctgaactgagagcgcgtcacgaaaaacgccgggacccctgtccgatacggacaggggtcccggcgttggaagaataccggaatcgcagggctatgccgtggcgtcgaaggggccggtgttcttgccgatagcgcaaagcacgcacctcggtttggcactcgaggcccgagagtgctaatctgcacaattagcactcgaggagtgagagtgataactggcagctgacggccggcatcacggactcgtctccgacagtgggaacaataccgtgtagccatatgtggaggaacaatggcaaagatcattgcatacgacgacgaagcgcgtcagggaatgctcgcgggcctcgacaagctcgccgacaccgtcaaggtcacccttggcccgaagggccgcaacgtggttctggacaagacctacggcgccccgaccatcaccaacgacggcgtttccatcgccaaggaaatcgaccttgatgacccgtacgagcgcatcggcgccgagctggtcaaggaagtcgccaagaagaccgacgatgtcgctggcgacggcaccaccaccgccaccgtgctggcccagtctttggtgcatgaaggcctgaagaacgtcaccgccggctccaacccgatcgccctgcgtcgtggtatcgagaaggcttccgaggccatcgtcaaggagctcgtcgcagctgccaaggacgtcgagaccaaggatcagatcgctgccaccgcaacgatctccgccgcggatccggaagtcggcgagaagatcgccgaagcgctggacaaggtcggccaggatggcgtcgtgaccgtcgaggacaacaaccgcttcggcctggatcttgacttcaccgaaggcatgcgtttcgacaagggctacatcgccccgtacttcgtgaccaacgccgaggaccagaccgcggtgctcgaagacccgtacatcctcctgacctccggcaagctgagctcccagcaggatgtcgtgcatgtggccgagctggtcatgaagaccggcaagccgctgatgatcatcgccgaggacgttgacggcgaggctctgccgaccctgatcctgaacaccatccgtggcacgttcaagtcctgcgccgtcaaggctccgggcttcggcgaccgccgtaaggccatgctgcaggatatggccatcctgaccggcgcacaggtcgtgtccgacgagctgggcctgaagctcgactccatcgacatgtccgtgctcggcaccgccaagaagatcatcgtctccaaggacgagaccaccatcgtgtccggtggcggctccaaggaggacgtggcagcccgcgtggctcagatccgcgccgaaatcgccaacaccgactccgactacgatcgtgaaaagctgcaggagcgcttggccaagctggccggtggcgtcgcggtcatcaaggtgggtgccgccaccgaggtcgaggccaaggaacgcaagcaccgcatcgaggatgccgtgcgcaacgccaaggccgccatcgaggaaggcctgctgccgggcggcggtgtcgctctggtccaggctgccgccaaggcccagaaggacgttcagcttgaaggcgacgaagccactggcgccgcaatcgtgttccgcgccatcgaggccccgatcaagcagatcgccgagaacgccggcctgtccggtgacgtggtgatcgacaaggttcgctccctgcccgacggtcagggtctgaacgccgccaccaacgaatacgaggatctactggccgccggcgtcaccgacccggtcaaggtcacccgttccgccctgcagaacgcagcctccatcgcaggcctgttcctgaccaccgaagctgtggtggccaacaagccggaaccgccggcagccgctccggccgctggcgccgacatgggctactgatcggcctgatataaccgatcggtccgatcgctgactgagcgaacagacattacgggaacccgtctttcctttggggggagacgggttccttgcgtttgccggccatgcggggtgatgccatcacttactgatgccaccactactgtgcgaataggcgggacgcctgcatttccgtgtccgcgtacagcgaggatgcctgcatgagcgcatgttgaatggattccaaggaccgttccatctgctgctgcgccgcacgccattgttcggccacggcattgaactgtgtggccgcgccgcccctccagacgctctgcaggttgttgagattgccgtacatgccctgtaccgcttgtcgaatcgattggatcgaggcgctcactgcggcgctggatgactgtatctgttccgaatcgacttgaaactgtggcatggtgtgttcctttcatcgttgaatgtgtgcatatcagccgttcgcttactgattggcgtatccgaacggtaaggtggagcgtatggcaaaagtgagtggaaccaatgcacaatcgaaggctgtggtcggaggatggtcccaaaccggatgcatcggcgtgtcgcgtcagtatgcccaaggcgaacatcgctggattcacgcgcttttcatactgttggcagccatgttgtgctgctgcatgacgttgtgcataactcccgtcggatgggccgatgatacgcagacgaacgatacgcagaccggcatcaccgcgacggataacatcaccgatactgaaaacctgcttggatcgaatgtgtccgaaatcaccgacgccatcaagaacaccaaaaaggagaccggggtcaccgttcgactgctgtacctgtcgacgttcaatacgggtaagaagaagccatcccagtgggcgagcgatttgctggaatccctgaagccccaaccgaataccgtgctgctcgccgtggccgcgaacgacggtaacctagtggtggcggtatcgtcgaactccgacgaatggctgaagaagaagtccacggtggacgcgctgtcggatgccgcgcagaagccgctgatggagtccacgcccgattggtcgaaatcggccacggcgatgatgaatcagatcgtactggccaaaaagacgtccacgtcatcgaacatcaccatgatcggcgtaggcatcatgggagccgttctggtgctgttggtcgtcatcatcgtagtgttccacatctatcgtaagaaacatccgaagcggcgcaggaagaggcgcggcagccatcgcaagaccaaaggcggcgaattcgagacgtatcgtgaggtcgaggagaagacggagccggcaaaggcgtggaatccgcaatcttcaacggaagacccagatatcgttcaggaaacgtccagcgaatcgagtgaagcttgaaggcatgagtaagcctattgaagcatcaattgtcgttgtcgatgacgaaccatccattcgcgagttgctggtggcctcgctgcatttcgcgggattcgaggtgaataccgcggcctccggttccgaggccatcgaggtcatcgaaaaaacgcaacccgatttgatcgtgctggatgtgatgcttccggatatcgatggtttcacggtgacccgacgcattcgtcaggaaggcatcgccacaccggtgctgtatttgacggcacgcgatgacacccaagacaaggtcatgggcctgaccgtcggcggcgacgattacgtgaccaaacctttcagcctggaggaagtggtggcgcgcatccgcgccattctgcgccgtacccaggaacaggtggaggacgatccgatcatccgggtcggcgatctggagatcaacgaggattcgcatgacgtatcccgtgccggccagccgatcgatctgagccccaccgaatacaaactgctccgttacctgatggacaacgaaggcagggtgctttccaaggcgcagattcttgaccatgtgtggcagtacgactggggcggcgacgcagcaatcgtggaatcctacatctcctatctacgtaagaaggtcgacggcatcgtggtcgaggacgccgacggcgaagagcataaggtgaccccgctcatcgaaaccaaacgtggcatcggctacatgattcgcgcacccaagaactgagacgatccgatcgatgagccgggacaccaagcgaacacaacctgacgatgcaggcgttcagggcgggcctgcggcgcaggccgcatctcaaacgtcgccagcccgtcgcccatcgttgtttcgacgtatcggcagacgggtcgatgcgattcctctgagcacgaaactggtcacctgcatcatcgtgctgctgaccatcggtaccatcggcatctcgttctccatccgaacgctggtcggcaactacctgctgcagaaaaccgatacgcagctgatcaaccaggcgcagctggtgttcaacaatatggattcgctgggcgataccaccgacagcgagaacagcaggaacagcctgatgaacacctactacgtggaggtgcgcaccagtgacagcaaaatcaccggaaccgggttggtgccggtgctcaaagacggagtggtttccgaaccgagcctgccggcggacggcagcagcgacggcgtgacgctggggcagcctttcaccactcaggccgtggtccatgtcaccggtaaccatgcgccggatcattccaccatgcaggcagcccaatcgccgtggcgtgtcgtagccctgccatggagcgagcgaggcaaggacggccaggttaaaaacagcggcatcgtgtatatcggcctgtcgttgagtgaccagatcgataccacgaatacgctgaccaggtactgcgcgatggtaggtatcgccgttgtgctgctcggtgcgattctaggcaccatcgtagtgcagagcacactcactccgctcaagcgcatcgagaagacggcggcgaaaatcgcggccggcgacctgagccagcgtgttccggatatgccggaaaacaccgaggtcggctcgctgtcggtgtcgctcaacaccatgctgacccgtatcgaggagagcttccatgcacaggcggagacaacggagaagatgaagcagttcgtctccgacgccagtcatgagctgcgtacgccgttggccgccattcatggctatgcggaactctataagatgcaacgcgatatgccgggggcgcttgaacgcgccgacgaatccatcgaacatatcgaagcctccagtgcgcgtatgacggtgctggtggaggatctgctgtccttggcgcgacttgacgaaggccgcggtatcgacatcacgcagcaggttccgctcacttcggtggtgcgcgatgcggccgatgatctgcacgcgcttgatccggaccgtggcatccgctgcggcctgatagcgatcaagcctggaaccgatctggagcacccgtccgacttcaccttccaggatggtgacatgccggcgatcacgttgaccggtgacgcctcaagactgcgccaggtggtcaccaacatcgtgggcaacatccaccggtacacgccggccgattcgccggtggagatctccatgggcgtgctgccggcatcgatcagcccggaatcgttgtcgcgcatgcccgccaacgaacggtccatgcatcatctggtcgaggccatcgaagtgggccaatccatgcaggtgggcatgaactatgccatcgtacgattctccgatcacggtccgggcgtaccgcctgaggcccgatcgaagatcttcgaacgtttctataccgccgatccctcccgcgcacggcagaagggcggtaccggactcggcatggccatcgcgcaatcggtggtcaaagcgcatcatggtttcatttgcgcatccggcagtgaagggggaggcctgacgttgacggtggtactgccggtcgcgccggtcgagccacgacccgtgccggaagcggaaacacgcaaggcggacaagaagggccggaaaacgaagaaatagaggccgactggcgcgaacaatggcgggtgcgatcatattcccgtcttctgcgaagggccggcattggtcatcatcccacctcttgcgctagactatatccttggtttgcaataggcggatgacgagcatccgcaagcaggtatgtgaaaagtagtgaggtgacaatgcctagcggacgcgttcgttggtttgatacgaacaaaggctatggattcattcagaacgagcagggcgccgatgtgtttctgcccgccgttgcgttgcccgaaggcgtgaagacgctgcgtaagggcgcgaaggtcgaatactccgtaatcgaagggcgtaggggacctcaggcgatgaacgtgacattggtcgcatcggccccgtcactggtcaaggccacccgaccgaagccggatgacatggccgccatcgtcgaggatctgatcaagttgctggattccgcagggaaccagttgcgtcgacatcgctacccttcgccggccgaaagcaagaagctggccacgctgatgcgtgccgttgccgataatttcgacgtacaggactgatttatgcccgataccactttggatccccaggcgatcgccaaggcggtggccatcgaagtcgccgacgaggacaatcaggtcggtgacttcgtcgaagccatcgacctaggtgatgacgtcaccgattttcgtttcgagacgcgtgtgcgcggctatgaaggctggcagtggtcggtgacgctgtaccacgacgtggaactcgatcattggacggtcaacgaatcatcgttggtaccgacggatagggcattgcgcccgccggcatggattccctggaaggaccgcctcgaacccaccgatctggcggtgaccgattccatcggcaccgagccggatgatcctcgcctggaagagggctttcgtgcgacggacgccggtgaaggcgctccggccgagacgcccgagatgtctgaaacgtctgagacatccaaggaggatgtcgaagatgcggttgaggaattcgaactgtcccgcaggcatgtgttgacgcccttggggcgtgcacagaccgccaagcgctggtatgaggggccgcgtggcccgaagtcgctgtccaccaagacggctgacggcaatccttgttccacctgcggtttcttcattcccctgaaaggtgagctgaatctactgttcggcgtgtgcgccaacaagtggagtcccgatgacggtcgcgtggtgtcagtcgaccatggatgcggcgagcattccgaaatcgagccgccggagccgtcgcatctgtgggtgcaatccaagccggccttcgacgacctgcatatcgacatcatcgcccaagctccgcgtgaggaacgcggttccgtcgaactgatcgaacaactggaaggcgaggagcccaatccgaacgatgaggaggaggcttcggaagaagacatcgaagccaacaccatcgatgacaacgaggcatcgcaggaggacgtgcaggaacatgccgaacctgcggacagccctgaggtggagaccacgctcgatctgagtgaagacgaagagactgagaagtcctccgatgatgaggagcccgctgaaaccggggaacagcccgtgaaacaagaggctggggaaaccggggactccgccggaccggaggaatcccccgagtcgacggaatcggagaagccatccgagacggagtccgcggaaccgactgaacagtaacgccttcctcacgttactgtagacaatcgaagcgagtcaaggaatcctgatgcccgtgtgatgccggtgtcggttggattccctgagtcgcttcgatcatttacgcttcaatcgttcaccatgacgaatgtgcatcgttcagtgcacgacggtgacggtgcaatctgcgaaattcacgatctgcttggataccgagccgaggaaatgcgcatccatgccggacagtccacgtgacccaaccaccagatggcgggcgaagcgcgaggccgcgataaggcctttcgcggcggaaatgtggaaggcatgcgattcgatgtcgaaatcatcgggaatgtctcgcgcgggaatctcaatggaatcgatcatctcgtccaacagatgctcggctcgctcctggccgaccgaaatcggtgcgacggcgttttcatatccttcgatcacgccgagatccttcaactgccaacagaacataacctgcaacggcgcgtgatgaatggacgccagctcaatggcgaactgcaacgcgtgcttcgacgtttccgagccgtccaccccgaccacgatcggacgttggttcttcggcagcggcgatccgggcatgtcgaaacgcacctcccgatcgccgggggtcagcgcattggcgatggcatcttgcacgctggcctcctcatcatcgagaatgcgcaccacggtgaccggaaccttcgcctcctcggccagcgatgccgacaatgagcccaaaaaccatcgggccacgcgaccgagcgaccggcggcccactacgatttgttgcgcgtccttgccgatttccaacagggccgcggtgccggaagcccttacggaagtgagtttgacacggtcctcattgatggccatgccggaactggcctgcgccacccagtcccgcagacgtttcgcgatgccatgacgcatggccgcccactgctcttcggaatccggttccgaacccatatcccacgaatgcgtccagccatataccgcattgacccgctggccggtgagggatgcctcctgcagtgcccagcgcaacgcggcgaaggattcgtcggaaccgtcgacaccgactacgatgtcacgttgacgaatgtccgtgtcaacgccggcttcggtggtttgtagggtggtgtcgctactcatgatgacctccttggtcgttgccctataccaagcatatcggtttggttgcgtcgagagcgcaaattcacatgcgcgtgggaataaacgtcatcgtgaatcggtagagtgttgaaggactaataagagtggaaggacaagcatgttcgaacggtttacagaccgtgcccggcgcgtgatcgtgctggctcaggaagaagctcgtaccctccagcacaactacatcggtaccgagcatctgctgctcggcctgattcgtgagggtgagggcgtcgccgcgaaggcgctggcctcgaagggtgtgtcgttggacgatacccgcaagcaggtcgaagagatgatcggtaaggggaatgcgtcgccgaacggccacattccttttactccgcatgccaggcaggtgttggagctgtcgttgcgtgaagcgttgcagctggggcacagctatatcggtaccgagcacatcctgctcggcctgattcatgagggcgaaggcgtcggtacccaggtgctgatcaagatggatgtcaatctcggcgagctgcgcagtgcgaccatcgatctgatccgtggcaattcaggcggtagccagggtgaaggcaagggcgatctcgccaatgccggcggcgtgcaggataggcggaaccagagcggttcggccattctcgaccagttcggtcgcaatctgaccgccgaagccgcttcgggtaagctcgacccggtgatcggtcgttcgagcgagatcgaacgcgtaatggtggtgctgagccggcgtaccaagaacaatccggtgctgatcggtgagccaggcgtcggcaagaccgccgtggtcgagggtttggcccagaagatcaacgccggcgatgtgccggagacgttgaaaggcaagcaggtctattccctggacttgggttccatggtggcaggttcccgctatcgtggcgatttcgaggaacgcctgaagaaggtcttgaaagagatcaagacccgtggtgacatcgtgctgttcatcgacgagatccataccatcgtgggcgcaggttccgcggatggtgccttgggcgcttccgacatgcttaagcccatgctggctcgcggcgaactgcagaccatcggcgccaccaccaccgacgagtaccgcaagtacatcgaaaaggatgcggcgctggaacgccgtttccagccgattcaggtgcatgagccgaccatcgccgaaaccatcgagatcctgaagggtctgcgtgaacgctacgagaatcaccatcatgtgacgatcaccgatggcgcgctgcaatccgcagcggagttgtcttcgcgttacattcaggaccgtcatctgcccgataaggccatcgatctgatcgatgaggctggtgcgcgcctgcgtatccgccgtctgaccgccccgccggagctcaaggagcttgatgcgaaggtgtccaagctggccgaagagaaggatcaggccatcaaggaccaggacttcgagaaggcggccgagctgcgcgacaggcaggagaagctggaagctgagcgcaaggagaaggaatcgtcctggcgtgaaggcgaatccgacgtgaagatggtcgtggacgaggatgtgattgccgaagtgatctcgcagaccaccggcattccggtgttcaagctcactcaggctgaatccaagaagctcatgagcatggaatccgagttgcacaagcgcatcatcggtcaggacgaggccgtgtcggcgctgtcccgctccatccgccgtgcgcgtgtgggcctgaaggacccgaagcgcccgtccggttcattcatcttcgccggcccgaccggtgtgggcaagactgagctggccaagacgctggcggagttcctgttcgatgatgaggacgcgctgatccgcgtggatatgtcggagttctccgaaaagtacgccgcatcgcgtctgttcggcgcccctccgggatatgtcggctatgaggagggcggcgagctcaccgaaaaggtgcgtcgcaagccgttctccgtggtgctgttcgacgagatcgagaaggcacatccggacatcttcaacacattgttgcaggtgctcgatgatggtcatctgaccgatggccagggccgcaaggtggatttcaagaacaccatcatcatcctgaccaccaatctcggcacccgcgacatcgcgaaggccgccaacacgggcttcaatcttggtacgaacaccgagtcgagctaccagcgcatgaaggatcaggtctcttcggaattgaagcagcagttccgtccggagttcctgaaccgtctggacgacatcatcgtgttcaagcagcttaccgagccgcaggtgcgccagatcgtcgaccttgacgtcaagcagctcaacgaccgtctgttcgaccgccacatgtcgctcgagctcaccgatgccgccaaggacctgctcgcgcagaagggctttgacccgctgctcggtgcccgtccattgcgccgcgtgatccagcgcgacatcgaggatgccatatcggagaagattctgatgggcgacctcgaagacggccagcgcgtgaaggtcgatgccgaaggcgagggcattctgggcgaattcaccttctccggagaggcgtttgaggagccggtgacggcggacgagtcgtctgagtcgtctgagtcagattccgccgagcccgtcgaggtttcggccgggaccgccgattcggcatcggaatcttccgaaaccgaataagtgactcggataccgcactaagcggctgaaatccacgaaaagcggcttatccatgacaacaatctgtcatggataagccgcttttcgtggatttcagctccttaaacgctggaaatatgcatcttagaacgtgagcagttccaaattggtgtcaattgattcgttgcgggtgaacaacgtgcgtcctctgcgcactgaacgcaatacggagcaacgctcatacacggcgtcgaataccgaggaggcgtctagaacgatgaaattcgcaggcttgccgggctcgagaccgtatgagtcacgtataccaagcgtggtggcgccgttgatggtcaggaatttcagcgcgtcgtcgatttcctcgaagctcatcatctgcgctaggtgcagtacataatcgagaatgagcatcatgttgccgttaccgactggataccacggatcctgcatggaatcctgtcccaaggatacgttcacgccctcctcggtgagttccttgacgcgcgtgataccgcgacgcttcgggaaggtgtcttggcggccctgaagatacaggttctcggtcggagcacaggcaaagttgatgtgtgcggccttaagcagcttggtgaggtgaaagaagtaggcgttgtcggccgaacccagtgagcaggtgtgactagccgtggtcttcttgccgatacctgcacggtaggcgagcgccgacagcaactccaggtaacgagagttcggatcatctgtttcatcgcaatgcacgtcgatgagcttgtcgtattttgacgccagttcgactacggtatgcatggagcgttcgccgaattcgcggcattgctcgaaatgtgggataccgccgacgcagtcggctcccatattcagaccttcctcgactagatcggcgccagattcaccgttgggcccttcgtaggagtacatgccctcttgcgggaaggatacgatttgcaaggtgacagtgtcctttaattcctccttgagttccagcaacgctttcagagaggtgagattcgggtcggtcacgtcggcatgtgagcggatgaactgtacgccatggcgcatctccttggcaatacctatcttcgcacgttctttgatttcttcgacggtcaaatcggatttcgtttcgctccagcgttgaatgccttcgaatagcgtacctgactcgttcacggctcctggtttgcgtgcggtgaatacatagtcgagatgcagatgtgtgtcacagaatggaggacagaccaatttaccctcaagatcgatgacatccacggtggacatgtccttgccctgagtggagagtctgtccgcgagatccggtgcgattttgacgaatctgccgtcctcgacgaggatgtcctggacaggtgtggtctcggcggcggtgctgcccggtatgccagtggcgatatgtgcattggtaaacagctgcgtgctcatggtgaatttccctttctgtcagttgctgagctgaaaaagactaattccgaattggtttgagaattgtgttggatgcattattacgtctgcgcatccagtcttcaccttgacgttgcgctgtttcgatgatttcctgctcatcgccatggactagatgtccgccgcgtaccagcatattgccgtcgacgaatacggtatctacgaaattgccttgcatagcgaaaactaaggcccagaccagattggtatctgaactgtcttcattccagcagatgggccttagacttggatggttcaggctgatgagaattatatcggcacgttttccgttttcaagtgatccaatttgatccgcaacaccaagtgaacgtgctccattaatagttgccattcgcagcatgtgtttggcgtcgtagatttttgcatctgcataacggaccttctgcatcagggaagctactttcatttcttggaaaagatccatgctgttattgtcaatcggaccatcactgcccaatgagacgttgattccggcttcctccatctctttgacacgagctgttccacacccgagtttggccgcggagattggacagtggcagacgctggcaccagtcgaagcaataagatccatatcgtttctgctgattgggacacaatgcccgagcgataggaattcgccgagaattcctcgctgaaaaagaagctgagtgatggacattccaaagcgagattgtgccgtagcctcttcttcagcatgctcgggaccatgcgtgtgaatgcgaactccatagcgttcatgcatggtgagggcgttgctgtacatctgctcgcttgcgtaaaatacgtcttcaatgcctgcttcaatttggattcttccgttgaagctgccgtgccattctttgatcagacgttcgttatctgtgcttgtctcaaagaaatcgtatggaggaatgtcggcggcatatggcgcgagaaaaacccggagtcccatatctccagccacttgtgcagcctgactcatgaaacggtgcatgtcttggacggtcgtggtaccgttcaggagacattccatgtatccgagcctgtatgcttgacgggcgtcttcaggtgtgcacgtgcgatgttcaaggtcatataccggtaaccaatcgacaagatcaaggttttcgtcgactccacggatgagagaagaatggttatgtgtatcgatgagaccgggaagggccgcatattgatgatggcagtcgatgattggagtgccatcaggaatgagtctctcattcatttgccctgcataatgaatgaggcttccttcgatgagaatcataccgtcacggaatacagcatcatacgagttgacagtgaaaagagtgacatgaataattgcctgcatgattcctcctgcatgtaacatcgtggacatttgagatcgttgttctgttgatagtatcggcgtacgtaattgcctatgagtaaaagcggtatgttccgaacatcactgagattggacaaaatgtcatggctgttactgtttgggatgtgattcacgatgatgtctttcagcaatgcgatccgtacattgcaggaggcgagaccggaatagataatgtggtacgttgggcctacactcatgagcgctacgatgtgacgcaatttctcattggcggtgaattcctgattatcgagggaagttccttggcggaacattccgacgacgaggggctgagagcgtatatcgattcgctggaagaagctcacattagtggactggcgattgaattagtggatttttttacggaaattccggaagccatgtctcaacgaggcaacgaaatagggctaccaatcatcggtctgcgaaagagacagccatttgtgatgctgtgtcaggagattaatacgcgaattactcgggaacagctactgtcgcatatggcaattgacaatttgtccagtgctcttaatgcgagattgtcggaatctcgatcggtacaggatattgctactgctctcgcagacaccactggcgaacgagtactcattatcacaccggatggtgaagtctgcgcgcaggctggcatggagatttcaccactgagtcatcatgattcgcaaaatacggaatcgttactgcacggagacattgttctgagaattgcgcgagacggattcactgtagctaatgttgttatttcccaacggatgacagtgatgaacgatgatgcaaagagacatatcatatccagtttatcgcaatcattgcctcctttcatgtcattaagcattcgttccaaactgatgatgcgactgctggcagggtgtagagatggcatcgtagcttctcatgaggaagagatggatgctcaggccatgttgcgtgcattggattatcttccgcaggtccactgctgctcctttatgatcggcattcggcaatggaacgggcgtgcgcatgtgatggagaccgttctcacacggctgcatgaaaagacagataatgctgtcacgctgcttgcggaaatcgagggctcttctattgttggtgcattcatgtgcgatgacgctgcaagatatgatgcgctgtcggattatggagaacgatatctgtcggaactattgcctaatgacgatatatgtatcttgactggtggacttgccataggcgcaaaaagtatgttggataccatagcaggtctccgattcgcttttcgatccgcctaccctcattgggggttgaaaatatctgctaatcaattcgcttatgcacgaatgctgtcgataggggagacacgattggcgattgatgcgttcgtcgcacaggtcgctggaagcttgatggatgtggatgatgtgatgattgacactttgtgcgcgctgtctgacgatatgggaagtaagacggaagcttgtatgagactaggaatcaaaaggcaaacgttgtacaaccgtttggagagagtggaacaaatcactgggatttctcaacacgactcgatgacttggagtctgatgttggtggcggcgaagatggtccagcagttgagaatcttataattctacatttggcgatttgtcaaatgtctctctttttggtttaacagtctgttcattgcggtgcaaatctctttctgcatagttggcatcacaatacgccgacaagggaatggttcggaccgtagaacaaccctttaggcaatctgaaagattcgagaaaggggcatctgatgactgtgagcgcaatctctgcgacgacgagttcgcaaggtcgaggttctggacccagcaatatcgggggagactacgaggattaccttcaagttgtaccggagcaggcgaagacgaagagcttatggggacagttctgggtgtggtttggtgcaaacgtcgcgcccatcaactggctacttggggctcttggcgtgcagatggggcttggcctttgggaaacgttcgcagtgatagtggtcggtaatctgattggtatgtctgtatttgggtgcatggtcctgttggggcaacgtaccggtcttaccggtatgctgctcggacgacgggtttttggacgtgtcggcaactatctgccgtcagtaatccagtccgttgttgttgttggatggtgtgccgtgaatacatgggtcgtgcttgatctggttacggctttgctgatgaaagtgggactggttgactccatcagcggtcattttgcattaaaggcagccattggcggtgtagtcatgattatccaagtgattatctcgctgtttggatataaagcgatttccacattcgagaagtggacggttcctccgacagttgcgattttggtaatcatgactattgcagcatggggattcatgggggttgactggaatttttctggcaacattgctaggggcacgaccgatcactttgccgcattgtcttctatcatgaccgccattggcattggttggggctttacatggttgacttatgcttgcgattactcacgtttcgtcagtaaggatgtttcccgaagaaagctttttgctgcaagcgctttgggacagttcataccggtttgctggttggggttgcttggggccacgcttgcgactaagtctggcagcattgatccaggtcagctgattgtcgacaattttggagctttggcgattcctgtgttgctactggtggtgcatggcccaatcgcaaccaatattctcaacatttatagctttaccttgtctgtgcagtgcttggatttgagggtgaatcgtcgtgtcattaatatttttgttggcgttttcgcctggtttggggtttgcctgttcttgagcctttctgacattggcaacactcttgacggctggctgtcttcggtggccggttggactgccgtctggggtggcattatgattattcatttctttgtgattgaacgcagccgaaatgatttttcccatgttcttgatgagaaaagcaaggacagtgcagcactggtgcgctggcaggctttggctgcgttttttgctggcctgttgatgtgctgggcgatgagctacggcagtttgttccaagggccgattgcttcagccatgggtggtgttgatctttcatggttcggcggtatgcttacctcaggattggtgtattatgtgctctccttggcgacaggtatcaatgaacgaaaggagatttgatacattatgctgattcacaatgttcacattgagaacagcgccgaactcagcgatgtccgtgttgaaaaagggagattctctcgtatcgatgcgggcatcgtcccatatgagggcgaagaaattgtcgatggcagagaaggactgctaataccgccgtttgtggactcgcatgttcatcttgatgcgacattaaccgcagggcagccggaatggaatgaaactggcacattatttgatggcattcgaatctggtcgacgcgcaagaaatccttaagtatcgatgatgttacagaacgtgccgaagcaaccattcttaaaatggtcggtcatggtattcagtacatccgtacacatgtggacgttaccgactctgatctcacggcgttgcgggcgcttctggctcttcaaaacaatatgcgcgacgttgtggatatccaaatcgttgcatttccgcaagagggaatcctgtcttttcctaacggcaagaagctcatggagaaggctattgacatgggagccgatgtagtcggaggcattcctcactatgaatttaatcgtgaatatggttcagaatctttgcattttcttgttgatttagcgcagcggaacgatagattgattgatgttcattgtgatgaaatcgacgatccagattctcgtaatcttgaggtgttggcaacactcgcatatgagacgggtatgatggatagagtgacagctagccatacaaccgctatgggttcatataatgatgcctatacatataaattattccgtttgctgaagatgtcgcaaattaattttgtgagtaatccactggtcaatatgcatctcggtggtcgctttgacacctatcctaaacggcgagggttaacaagagtcaaagaactggataaggcaggtataaacgtatcatttggtgaagatgacattcaggatccgtggaatccgctgggagacggaaatatgctggatgtcattcatatgggagtctatgcatcacaattgatgggatactctcaaattcaggattcatatcgatttgctacgtataatggcgctaagacgctccatcttggagatgattatggaatcgccgtcggcaatactgccaattgcatcattatagatgccagtgatttttttcatgcacttaatgagcattcttctgtgttatataacattcgagaaggacgtattatctcacacacgaaaaaggcaaaaacagagctttttcggtaaatcgaaagagattatgggaggtaaatacggtgcattccactgaattatgatatgcaccgtatttactagtcgtaaaacaataccttatttgatggcgttcagccactgttccttggtagccttttcggcctcgagcttggccttcttcttcggatcggactcagcggcgattttggcgtcgagctcggtcagctgggcgttcagctgttcctcgaaggaggatttgcgggcgtcggcttccggatcggactgcttccaagcagcatcctcgacggccttgatttgcttatccacggcgtcaagacggccttcgatgcggcggacttcgtcgcgcggcacatagccgatctgatcccactcctcctgaatggcggcaagtgcctgacgcgcctgcttggcggcctcctcatccttgaccggaacaagggcttcggccttgaccagcagttcctccttcttggccaggttctccttttcggaggagctgatctggtcacggtccgcctgacgtgcgttgaagaaggtgtcggcggcggcacggaactgggcccacatggcatcatcctcgcggcgtcccgcacggccggccttcttccaacgatccatcagctcgctgaacttgcgtgaggtttccacccaagcggtggagtccttcagggcttcggcctcggcaatgatggcttccttggcctccttggcttcgttgcgttcggcgtcgcgggtctgggcccacttgcggcgtgccacgttgaaggcggtgcgtgccgtggagaagcgggaccacagcgcatcggcatcggccttgtcgatgcgcacattgttgcgctgatgctcctgccactgctggaagagcgagcggaacttgtcggaagtggaacgccagttggtgttgctgtcaagaccggcggcaagggcttcggccttttccacgatgacggtgcgttcggccactgccttggccacggctgccttacgggcttcggaaagctgggccttcttggccgcaccctcttccttcaaggcttcgaactgcgccttgagggccgccagatcaccgacgacggccggctgttcggtctcttcggacagggtcttcagcgagtcgtcgatttcgcgggacttgacgctgctggacttgagcctgttcgcaaacaggtcgagcttggccttgagatcgaggtaacggcgtgcatacaatgccagggcttcttctttggaggcatccgggaactggccgacctcacgttctccctctgcctccttgacgaatacggtgccgtcatcggagacgcgtccgaaagcctcggcggctttgacatcagcctcggagaagccggtgccggtggctgccggagccgggtgggacggagtcttcttggcgaatgcggcgggggatggggcgtgcggcttcatcgctgccgggcttggaacggccggtttgctggcctgggctgcgggcgtcgtcgcctgctcggtgatttcattggtgttctcggacgcggtgacattctcgtcggccatggccagctcctttaagtaagcttcatgtagtgcagggaagcggatgacgcagatcgacccaggaaagcctgaacaatcgtgcggcattttccgcaacctcatttattatagggaaccgtggcaaaaggcgcatctatttcaggatttccagagtggctcccctctgaacgtgttgtggagcagcgtgttatcgacacgctccgtaatgtattcgaactcaatggcttcatcggtattgaaactcgtgcggttgagcagggttcgagcctgttgaagaagggtgagaccagcaaggagatttacctgctgagtcgtctgcaggaggtcggtcacgagtccgacactccgattgaggatcgtttgggcctgcattttgatctgacggttccgctgagtcggtatgtggtcgagcattcaggtgacctcgcctttcccttcaagcgttggcagattcagaaggtgtggcgtggcgagcgtccgcaggagggccgtttccgcgagttcgtgcaggccgatatcgatgtgatcggcaatggcgatctgcctgaccattacgaggtcgaattgccgctggtcatggtgtcggcgctcgaacatctgcgcgagttcggcttgccgaaggccaccgtgcatgcgaacaaccgcaagctgtccgaaggcttttatcgcggtttgggactgaccgacgtcgaaggcgtgctgcgtgagatcgacaagctcgacaagatcggcgccgacgaagtggccaagctgctcgtcgaaggctgcggtgcaaacgaaaatcaggcacgagcctgccttgaactggctgaactgaccgccgcaaatggagccgatctggccgaaaaattcgatgcgttgtgcgcgaagcacgacatcgcggccgattccgacgcctacgtgctggcccgtcagggcctcgacaccttggcgatgatcgttgatgaggcagcgcgcattcgtccgggttccgtgatcgccgacctgaagatcgcccgcggtctggactactacaccggttccgtatatgagaccttccttgatggcgccgcatcactcggctccatctgctccggtggccgctacgacaacctcgcttcgcagggcaacaagaagtatcccggcgtcggtctgtcgatcggcctgtcccgtctggtctcctacatgctgcatgccgcaggtgcgcacgccaaccgggtttccccggcaagcgtgctcgtggccgtgtggaacgaagccgaccgttccgcttccaacgtaatcgccaaccagcttcgcgcacgcggcatcgcggccgatgtggccccgactgcggccaagctcggcaagcagatcaaatacgcggacaagctgggcatcccgtacgtgtggttcccctccgatgccgccgaggatggtgccggcgacgaagtcaagaacatcatcaccggtgaccagcagccggctgatgcgaggtcgtgggagccggatactgtgtatgcccggcaaaccgttaccgtcgaagcctgaacatcaaggcatacggtattgtttcgttcattgagcataaggaaacaaagaatagaggaagcatgagccagacggcttatagaacacatcatgccaccgaggtgaccgaggagctcgttggccagaaggtgacgctcgccggttgggtggatcgtcgtcgtgaccacggcggtgtggccttcatcgatcttcgcgacaacaccggtctggtgcaggtcgtgatctacgacgaggaaatggcgcgtccgttgcgctccgagttcgtgatccgggtcatcggcgaggtgcgtctgcgtccggatggcaacgagaacgaccatctggccaccggcaagatcgaggtcgttgccgaaaccatcgaggtgctcgccaagtccgacgctttgccgttccaggtctccacggctcttgaaaacgagtctgaaaacaagctgccgggcgaggatgtgcgtctgaagtaccgttacctcgatctgcgtcgtccatccatgcagcacaatctgaaactgcgctcccagatgtcgaaggccgcacgtcacgccctcgaggagatgggcttcgaagaggtcgagactccgaccatgatcaagtccacgccggaaggcgctcgcgacttcgtggtgccggcccgtctcgtgccgggttcctggtatgctctgccgcagtctccgcagttgctgaagcagctgctcatggtctccggtgtggagcgctactatcagttggcccgttgctaccgcgatgaggatttccgtgccgaccgccagccggaattcacccagctcgacatggagatggccttcgtggatcaggaggatgtgatggccatggccgagaaggtcatcgccgccatctggaagtccgcgggttacgagattcagttgccgattcagcgcatcacctggcaggaagccatggataaatatggctccgacaagccggatctgcgctttggcaacccgctggtcgagctgaccgactatttcaagaacaccccgttccgcgtgttccaggcaccgtacgtcggtgccgtgctcttcaagggtggcgctgccacgcctcgccgtcagttcgacgcatggcaggattgggccaagcagcgtggcgccaagggtctcgcctatgtggtctttgccgagaacggtgagcttaagggccccgttgccaagaatctgtccgaagaggagcgcaatggtctgaaggaagccgttggcgccgaagacggagacgcagtgttcttcgccgccggccgtcgcacttccgcgcaggaactgctgggcgccgtgcgtgtggagctggccgatcgcgccggcttgctcaagcccgacgatttcgccttcacctgggtcgtggacttcccgttgttcaagacgaccgatgatccggatgatgacgatgtggcagtcggtcactccaagtggacctccatgcatcatccgttcaccatgccgtcgaaggattggatcgacaccttcgacaaggatccggaacatgccatgtccgactcctacgacatcgtctgcaacggcaacgaaatgggcggcggctccgtgcgtatccaccgcgacgacattcaggaccgtgtgttggacgtgctgggcattactccggaagaggccgccgacaagttcggcttcctgcttgaggctttcaagtacggtgctccgccgcatgccggcatcgccctcggctgggaccgtaccgccgccattctggcaggtgccgattccatccgtgacgtcatcgccttcccgaaggccggcggcggtcgtgatccgctgaccggtgctccggctccgatctccgatgaacagcgcgccgaaaccggtgtcgactatgatccggatgaggacgaggactgacacctcttcttgcggtaggacgagggctgttcgtgcatgacaccatgcgcgaacagccctcgttcatggttggagcacctgttttcgtatgcgttcgctacagtgagaaagaaggggaacgctaactattaccaagaaagagttattttcacaggatgatttccgatatagaaacgctatttcgtagtgcatgggttcgcctgtgcacgttgttgatggtcgttgcggttgcggttctgggccttgcggccgctgctcccgtcgcccatgccgctgaagtcggcgacccggcggtaaccaagggcaagacctacaagatcggtaccgacaccacgttcgctcctttcgaatatcaggagaagggcaagatggtcggcatcgacatggagctgatccaatccatcgccaagagggaaggcttcaaaattgagattcaggcctccggtttcaatgccgcattgcaggcgttgagctcgaatcaggtggacttggtcatcgcgggcatgtcgatcaccgacgagcgcaaggcgacctatgatttctccgacccgtacttccagtcgggcattcagatggccgtcgccgccgacaatgacgacatcaaaagctataaggacctcgacgacaagaccgtggtggcgaaaaccggttccgaaggcgaggcctatgccaaggaacatgccaaggaatacggctacaccgtcacatccgtcgaccaatcctcgaccatgtacgagatggtcaagtccggcaacgccgtcgccgtattcgacgattacccggtgctggcctatggcgtatcccagcacaacggtctgaagatcgtcaccccgaaagtgccgcacggcgaatacggcatggccgtgaacaaaggcaagaacgccgatctgctggcagccatcgacgatggtctcgcccaactgatctcctcgggcgaatacgagacgatcatcgcgaagtatctcggtgccgagggcgccaaggcgcaggtcaaggccatttccggcatggtcaccgacaacgatgccaccgcaaccgccaaagccaaggtcgggttcctgggactggccaagcagtcgctgcccgcgttgatgattggcctcaagaacacgctgttcatcactgtcatctcattcgccatcgccctgcttctaggtgtggccttcggcctgatgcgagtaggggagaacagggtcgcctccggcgtctccaaagtgtatgtcgccatcttccgtggtactccgattctggtgtgggcgttcttcttctacttcggcgtgccgcagctgattgggcacagcgtgaacatctggattgccggtgcgctgacgctgtcgctcaactcaggcgcctacctggcggaaatcgtacgtggtgccatccaagccgtcgatcccggccagatggaaggcgctcgctcactcggtctcaatcgtcgtcagtccatggcgcgcgtgatcctgccgcaagccagcaaaatcgccatgccatcggtcatcaaccagctggtcatcatgatcaaggattcctcactgctgctggccatcggcttcggcgaactgctctaccaggcccagcagctgtatgcggcgaacttccgcgtcaccgaaaccctgctgttggtcggcgtgatctacttcgtggccatcaccatgctgacatggctggccaatatcgtcgataggaaggtgaatcgatgagcgaaagcaacgtcaggcatatgatgctcgatgacggcatgaccggcggaaccggcaccgacgatgtgatgatcgaggtcacggatctccgcaagagctacggcaatgtcgaagtcatcaaaggagtggatctgaccgtgcaccgtggtgaggtgatctgcatcatcggtccctccggcgcaggcaagtccacgttgctgcgctgccttaacggattggaacacgccaccagcggccggatcgtggtcaacgggcatgacctgaacgacccgaaggtgaacatcgacaaggtgcgcgaacaggtcggcatggtcttccagcacttcaatctgtttaacaacatgagcgtgatcgacaacatcacgcttgcgcccaagttggtgcacaaggagtccgagatccaggcacgtgagcacgccatgcggctgctcgaaaccgtcggactggccgaaaaggccgacgccatgccacgttcgctttccggcggccagaagcagcgcgtggccatcgcgcgttcgctggccatgcgcccgaaggtgatgctgttcgacgaggcgacctccgcgctcgatccggaaatggtcggcgatgtgctcgaggtcatgcgagagctcgccaaggagggcatgaccatggtgttggtcacccatgagatgggcttcgcccgcgaggtggccacgcgagtcatcttcaccgatgccggtgtgatcgaagaggaggggactcccgatcagatcttcaatcacccgaagagcgaaaggctcaggaccttcctttccaaggtgctgtagcgggtggcaatctgcacgtggaagtcaggcgaacgcccatgagaattcaccctgcgttcgcctgtctcacccttggtcgttgctttatgaccatagccttgccggtatgaacatcagtgagatctgccggcgctgcatcaaggcgttcaccaatagggtgccggcgagggtgacctacggggtggcggccgctttggtcgtcgtggcggtactcgtcatcgagttgccgcggctgtggtgaggtgacaccgtctcacaatgcgaacttcgtctcatgaggaaacaggcagggaaacaaaggctccctatacttgccggttatgtctgatatgaacgaaaccacagcaaagcgcccgttggtgccgggcgccgaagtcagcgatcgtccactcgtcgaactgacccatgtcgagaagcactatggtgacctgcacgtcctgaaggacatcaatctcaccgtcaagaagggtgaggtactcgtcatcgtcggtccgtccggttccggcaagtccacgatgtgccgcaccatcaaccgtctggagaccatcgattcgggcgatatccgcatcgacggcaagccgttgccgcaggaaggcaaggagcttgccagcctgcgtgccgaggtcggcatggtgttccagtcgttcaacctgttcgccaacaagaccattctcgaaaacgtgacgctcgcgccgatcaaggtgcgccacatggacaagaaggccgccgaggacctcgccatggatctgcttggtcgagtcggcgtggcctcacaggcctccaagatgccgtcacagctgtccggcggccagcagcagcgcgtggccatcgcccgagcgctcgccatgcagccgaaggtcatgctgttcgacgagccgacctccgcgctcgatccggaaatggtcaatgaggtgctcgatgtcatggtcgaactcgcccatgaaggcatgaccatgctgtgcgtgacccatgagatgggcttcgcgcgcaaggtggccgacaaggtcgtgttcatggccgacggccagattctcgaacagagcacgccggatgatttcttcgaaaatccgaagaccgatcgtgccaaggacttcctgtcgaagatcctcacccactgagcgattcgaacacgcagaagagggattttccaatgacatcactttcaaccagggcgaagcgtatgctgcgcagggccgttgcggccctctgcgcatgcgcatgcgtgttcgccgtctccgcgtgcggcgcggatgatgcggatggcaagatccgcatcggcattaaattcgaccagcccggtctgggcttcaagaagaacggcacctacgtcggcttcgacgtggatgtggccaagtacgtggccaagaagctcggttattccgaggatcagatcgtatggaaggaggcgccctccaagcagcgtgaagccatgctgcagaacggtgacgtcgattatatcgtcgcatcctattccatcacagacgaacgcaagaaggtcgtcgatttcgctggaccgtacttcgtggcaggccaggatttgctggtacgcaaagacgagaagggcatcgacgggcccacggacctgaacggcaagcggttgtgctccatgaccggcaccacgtccgcggtcaatgtcaaggagaagttcgccaagcagacccagctgatggaacagccgggcatggcggaatgcgccaccgcgttgctttcaggcatcgtggatgctgccaccacagatgacatcatcctcgcaggcctcgcctcagcctcccgcggacgactgcgcttggtgggcaagccgttcacccaagagtattacggcatcggcgtcaagaaaggcaacaccgagctgaagaacaagatcaacagcgccatcaccgatatgattcaggatggctcctggaagcgtgccatcgccgacaatacgaagggcgtggattacaccccgaacgacaagtacaatccgcctgtgccgaatgggaaggggaattaagtgatggacggtttcctcgcgctattcagccaatacaacattcccggcgcttttctggtgaatatcgagttgactttgtggtcggcgctgttctctacgattctgggcgtcatccttgtgatgatgcgcatctcgccgatcgcttcgctccgtaccgtcgccggcgcctatgtcgaactgttcaagaatctgccgttgaccatcatcatggtgttcatggtgctaggcgcgtacgcccagctgaaattcagcttctccgataccttcgccacgaacttcttctggctggcggtaacgggtctgagcctgtataccgcggccttcgtatgcgaatcgttgcgctcgggcatcaacaccgtgccgctcggccaggccgaagcgtcgcgtgcgctgggcctgagcttcatgcagtcagccacgcagatcatcctcccgcaggccttccgtggctccgtggcgcctctgggcaacacgctgatcgcattgctgaagaactccaccgtcgcggcggccgcgtcagtggccaccgaaacctcgacgatgatgagtgagatgattgaatatcatgccgaccaaatcgtgccgatcttcctgatcttcgccttcggctacgtgattctgatcattccgattggcatgctgacgacgtatctatccaacaagctcgcggtgaggaggtgacgcaccatggcaagcaatgaaagcgccgtactgttcgaccagccgggcccgaagggccgcaagaccatccgtatcgtcaattggatcgcaggcatcgtcttcgcaatcgtgctcgtgctgatgctgatgcgtctgcacaacccgccggacggcgagaaccagctgagctgggaattgtggaagccagccctcgacagtgaggcatggaccgatttctacctgccgggtctgtgggccacggttcgtgccaccatactcgcggtgatcggggccgtggcgttcggtctggtcttcggcatcggccgactgctgccaagcctgatcattcgcaccgtttccggcgccatcgtggaattcgcccgagccgtgccggtgctgttgctcatgatcttcttctggcgttggtttgccttcgcgggcctgccaagcccggcttactgggccgtggtactcgcattggtgatctataacggctccgtggtcgccgagctggttcgctccggtgtgggtaacctgccgaacggccagagggaggcatccctcgccctcggtctgacccgtacgcagtcactcatgcagatcgaagtgccgcaggccatctacgccatgctgccggccgccgtgacccagctggtcgtggtgctgaaggacaccgccctcggctcgattatcatgtacaccgacctgttgcaggagtcccgccgactcggctcgatgtacttcaacatcctgcagaccctcgtggtggccgcagtcgtgtacttcatcgcatgttggctgctgagccggttggccgaatggctgccggaacgcatgcagaggcacaccgccgcccccgccgaacccgagccggtcgccccgatcgccatcatggatccgtctaacgtgaaccagatcgccgtggccaaggaaggcgtgccgctgggcggtgcgcaacgccagtaccatgtgcaccatcgtggtacgaacgcgtcgattcgccactggcgtcagacgcggtacgaccaaggctacgatgagacgcatccggaaagccagatcaagttcgacaagaacggcaaaccgcttcgcgagaacccgttcggtgatcttctgaaggaagctaagccgaaggaagacaagccgaagggcagcaagtaacacaccatgaccgattctttgggggtatccccgagaatcggtcatttgcgtctaccatgggaaccgtcaatcgtcaggcagggaggcttgggatggcggataaggattcgaagaagggtgaggcaaagaaccccgcaatcgcgaaaacgctcaacaaagtggaggaacgactcgacatgggagaacgttccgattcggtggcggaaggcttggcgaacgtagccaaggcgagcgaattgctgagttcggtgtggacgttgcctcccgggcagctgttgcgattccaccacgatacgaaggtggccgaacttgacggcgattccacgccgggattcgacggcaacaaggaggatgcggaacggttcattggcatcagctccgcggaaatcgcacgataccagcgattgatgtatgccaacggcgtgaaggggtcacgtaggcgcctgctcatcgtgttgcagggcatggatgcctcgggcaagggtggcatcgtacggcatgtgttcagccaaggcgatccgatgggcatgcactatcacggtttcggagctcccaaaggcgaggagctcgatcacgactatctgtggcgtatcaaacgtgagttgcccaagaacggctggatcgccatcttcgaccgatcccagtatgaggatgtcgtcatgccgcatgtccaccgcacctatccggaagaggtatggcggccccgatacgacgaaatcaaccgtttcgaatcgcagttggtatccgacggctgcgccattatcaaaatcttcctcgtggtcagcaaagaggagcagaaaaggcatttcctgagccgactggacgatccgaccaaatattggaaattcgatcccagtgatcttgaggcgcgtgaacgctgggacgactatatggatgcctggcaggaggtattcgtgaaaaccagtaccgagcaggcgccatggtatctggtacctgccgataaccgctggtattccagggcggtggtctccgaactgttgcgcaatacgctcaagaacatgaatatgatctggccgccgctcgaagtcgacgccgacgaaatgcgacgtcgactcaacgacatgtgacggcgtgacggtcagttggtgacggaatagtcgaagaatacgacctcgccgctggattgcgtggcatccaagtcgaccacgccggtgatggcccaatcatggtcgccgtcggaatcgtcgatgatctggcgtactttccagctgtgttcgtctttctccttgctttcgtcaaggatgaacagttcgccgctgcgcgccttcgcatcggtgttcacatactcgtgttcgtcgtagaagtcgtcaagcacgtcctcccactcgtgcacgccataaccccagtccttgtcgagagcccccaactcttcgggtctgtcgagatccatgagttgcactcggcggaacatggcgttgcgtatgagcacggtaaggccacgacgatcctcaaccacggcgttcctcgtgccgggagccgccagattcgcggcggcttcggcggcttcggcatcggccccggcattctcccactcgtcaaccagactcgaatcgatggaacgtaccaccacacgcaaccatgagatgatgtcatgcaattgctcatcacgtttctcggccggtacggtacgggccaatgcacggtaggcgtcggacaggtaacgcagcagcgtgccctcggaacgggcgatggcatagcgggcgatgtagccggtgaaatcggaagccgtctcgaccatgtctcgcaccactgacttcgggctcagccaataatcgttcgcccaaggcacatcatggcgatattcgtcgaatgcggcctgcagcatgtcctccaacggcttgggataggtgatttcctgcaagcggtccatgcgttcgtcatagtcgaggccgtcctccttcatgcggatcatcgcctcatcgcgcgcctggcgttcctgcgcgcgcaacacctgcttgggatcctccaacgtggcttccaccatggagatcacatccagcgcatacgtttccgactccggatcgagcagctccaaggctgccagcaggaacgggctcagcggttgatcgagtgcgaaatcgtcaggcacgtcgacggtcatgaaatagttcttaccaccgtcgtcacggtcttcggtctcgatcacgttcgtgtcgaacagtgtctggaagatctcgtcggcacgcgcatgcagacgttccttctgctccgggctctgcgcggaatcgtcgataagacaatccacgcggtagcgtgcgtcgccgccctgctccacttcgttcagcaccatcgaatgcgtgatcttcatatgtggcaccaatgtttccggtgcggcgtcgatgagtctgtcgaatgtgctctcgttccatgtcacgaaaccttccggtgcctttttgcgcttgaccttcttgagtttcttcggatcgttgccggccttggcgagtgccttggcgttctcgatttcgaattcggggccttcggcgatgaccaggccttccgtgtcgaaacccatacggcccgcacgacctgcgatctggtgaaactcgcgggcgcgcagcctgcgcatcttcgtgccatcgaacttggtcaaagccgtcaacaccacggaatgaatcggcacattgatgccgacccccaacgtatccgtgccgcagatcaccggcaacagcccctgctgggcgagctgttcgaccagacggcggtagcgggggagcatgccggcatgatggatgccgacgcccgtacgcagcaggcgttgcaggatcttgccgaatgcggtggtgaacttcgtgcctttgatggcctcggcgatggcgttgcgttgctccttgctggacacgcccgtgcttgccagcgcattggcggtctccaacgccgcatcctgagagaaatgcacgacgtagatcggcgtctcgcctttgccgaatgccagttccaccgtcttttccaacgggtcgagcgtgtattcgtaggtcaatggcaccgggcggggcgcatcggcgatgatatcgacatccgtgtcggtcatgccttccagcctgtcggcgatggcatcgacgttgccgagcgtcgcgctcatcagcagaaactgcgtatccggtagggtcaacagcggtacctgccaggcccaaccacgttcgggatcgccatagtaatggaactcgtccatcgccacgcatccgacatcggcatgccgtccctcgcgcaatgcctgattggcgagaatctcggcggtgcagcagatgatcggcgcatccgcattgatgtgggtgtcgccggtgatcatgccgacatgctcacggccgaacacctcgaccagatcgaagaacttctcggagaccagcgccttgatcggagccgtgtagtaggaacgccgtcccgtgcacagagccgtgaaatgcatgccgagagccaccaacgacttgccggaaccggtcggggtgttgagaatcacgtggtcgcccgccagaagatccatgatcgcctcttcctgatgcggccacggttcgacgcccttgacgttcgctacccaatcgaagaaacgttcgtagatctcatccgtatcgatgttgcgttcgccctcgtcccaacgcggcgccaacgcgcccaacgagccatagttcgtatcgtctgccatagctgcaagtctaccgatgggttacgaacgcgcgtgtcgaacgtgtgttcgaattttgtgcctcgttggagtagagttggcttcatgactgaggatttgttcggtgcgatggaggcgccggaggagatgacgagaccactggccgtgcgcatgcgcccgtcaacggttgatgaggtcgtcgggcaggggcgtgtgctgggagagggttcgccgctgcgcaggctcgcgaatccggcttccaggaaatcgcttaccgcgccgagctccatcatcctgttcgggcctcccggggtgggcaagaccacactcgcctacatcgtcgccaagcagtccggtcgtgtattcgaggagctgtcagccgtgacttccggtgtcaaagacgtgcgggacgtgctcaagcgtgcgcacgaccgactggtcgccgaaggcaaggagacggtgctgttcatcgacgaagtgcatcgtttttccaaatcacagcaggatgcgctgttgcccagcgtggaaaaccgcgacgtgaccttcatcgcggcgaccaccgagaatccgagcttctccgtcatcaaaccgctgctgagccggtcggtcgtcgtcaaactcgaatcgctggaaccggatgatctgagaaccctcatcaaccgtgccgtcgaagacgagcgagggctgaacaacgaggtgcgaatccgcgatgacgccgtggatgaaatcatccgcatggccagtggcgacgcacgcaagacactgaccatcctcgaggcggccgcgggtgcgctcaccggggacaaggagcgtaagaagggcgcgaaacgacctgtcatcacacctgacgtggtatcgaaggtcatggatgtggccaccgtgcgttatgacaaggacggcgacgaccattacgatgtgatctcagcattcattaaatccatgcgcggctccgatccggacgccaccatgcactatctggctcgtatgctgcgtgccggagaggacccgcgtttcatcgcccgccgcatcatgatcgcagcctcggaagaggtgggcatggccgccccgcagattctgcaggtcaccgtggcggccgcacaggccgtagccatgatcggcatgccggaagcgcgcatcattctggcggaggcggcgctcgccgtggcgaccgcgccgaaatccaacgccagctacaacgccatcaattcagcgctcgccgacgtggatgcggggctgatcgggcaggtgccactgcacttgcgcaatgcgccgacggccttgatgaaaagctggggcaaccacgaagggtacagatacgcgcatgactggccgggtgcggtggctccgcagcagtacatgcccgacgaattgaaaggccgcgaatactaccatccgaacgaccgtggctacgaacatgaggttaagccgcggctggagaaaatccgccggattcttcatgacgaggatgagacgcagcaataggcgacccaagtgggccggcggtgaaagcgtgtcgaaaacggtcagggcctccgctacactgctagatggctttccggcaacggccatcgcacttggccgtaggaaaaagtgcgcagacagggaaatatggaagcagagaacatcgtaaagagcaacgaatcatcaggcaacgaaataacacataacacgacggtcgccaatcccaccccagacgaacgtatcccaagcaaactcatcggagccatcgtggcagtagggtcgttggcgttcatcggcattctcaccgagacggtgatgaccgtgctcttcccgcaactcatgagggaattcgacgtcgataccgccaccgtgcaatggatcaccaccatctacctgctggtggtggcctccaccatgccattgtcttcctacctcaaccgcaagttcaggcaccgcacgctgtttctggccgcggtggcgctcgcggtgttgggatcgctgatcatgatcttcggccatacgttcccggtgattctcgtcgcacgtgtggtccagggcgtcggatcgggcgtggcgactccgttgatgatcaacatcatcctcgagcaggctccgcgcaccaaggtcggacgtctgatgggcgtaggatcgctcgtcatcaccgtggccccagccatcggtcccaccgtcggcggcgccatttccagcatcctgccatggcgtgcgattttcgtcatcgtgattccggtgattctgctgatctcgttgccggtaggcttgcggtgcatcgaacagcaccgtccgaccgaagaggcgcacctgaatccgctgcagttcatggcgatcgtattgtcgctatgcggtctggtgatgttcctcaaccaggccggcgtggccatcggtgccgcggtcggtggcggcagtgcgctaccttcgaccgccatcgcggtcatcagcctaatcgtcggcctgggttcgctggcggtcttcggctggtcctcgaggcgttccttctcaccgctcatacgtctcggttggttacgcgatccgatggtgctgttgcatctgatcgcctacatgatcctgccgatcgtcggcatcggattcggctatgtcatcaccaatctggctcagctttcgcttggtacgaacgctttcgtcgccggtgcgctggtgttgccgggcgcactgatcggcgccttcttcgcaccggtaggcggcatgctctacgaccgattcggcgcgttccgtccgattctcggggccttctgcgcggccatctgcggtccggttctgctgttggcattctcgatgcatctgactccggcgatgctggcgggcttctatttcattttcggactcggctattcgctgggattgtcgaacatcatgaccaacgcgttgaaccatatcaaccccgtattcatgccggacggcaacgccgtgttcaataccggactgcagttcggcggtgcagccggaacggcgctgttttccacgattctcgcagtggcccaggccggagccggcaaggaggggagcgacgctttccgccatgccacggccgtaggcggagggtggaccttcgccacgatgatcgccatcgtcgccatcgccatctgttgcctgatcgtggcgttccgtatcggttcgaagcgtcgataacgtgccatggaaaacgcctgtagcgtaatgtgaagtgggcgcttcgcaagggaatcggggcttgctaatctgtctctaccgtctaatcgagaggacaggatatgaaacccggatacccgcataacggcatcaccacggcattgttcaagccagtcgcggcagcgctttccatcgtcgcgctgctggcaggttgcggttccgtggaggcgaaggattccaagaccgagatcgccagcatcgacaaggtggtcagcgtcaacatcaccgagccgtccaacggcctgctccccagcgataccagcgatatgtccggatggaagatcgtcagtcagctatatgacgggttggtcactttcgacgcatcgggcaacgaaacgcttgtcgaggccgaatcgatcactccgaacgatgacgcatccgaatacacgatcgtcatcaaaccggatctggcgttctccaatggcgagaagatcactgccaagacctatgcgcggagctggtcattcgcggccaatgcggccaatgggcaggtgggggcctccattttcgaagacatccggggatatgacgagttgcaggatgagaaaggctccaagaccgcccaactatccggcctcgacgtggtggatgacaccacattgaaggttacgctcaaagcgcccaactcggcgttcctgtacaagatcggagacatcgccttcctgccgatgccatccgaagtgatcgagaatcccaaggaatatgggcaaaaaccgataggcaacggtccatacaagctgaaggcgtacaagggcggcgaggaaatcatcctcgaacgtgatgcttcctataccggtccccgcaagaccagcaatgccggtatcgacttcaaggtctaccagagcctcgacgcggcctactcggatctgctggccggcaatctcgatgtgcttgactccattccgacttccgcgctgaaaacctatcggagcgagacatccatcactgcggtcagcaagccaggcccggcgttctcggccttcaccattgcccagaacctcaagcattttcagggcgaggaaggcaaataccgccgccaggccatcgcacatgccatcaaccgtgagaatatcgccaaggcgattttcggtggcaccgtgaccccggccacggacttccttgcgccggtgatcaaggggtatgacgccaatctcgacaccgatggcgtgctggcatacgatgagacgaaagccaaggagctgtgggccaaggcggacgccatctcgccatgggacggcaccttccgcatcgcctacagcgccgacggcaccgacagggaatgggtggaggccgcggccaactccatccgcaacacgctcggcatcaactccgaaagctacccattcgccacgtccaaggaattgaagagcgcgattcaggaacgcaccgtcaacgcggcgttcaagtcgggcatgcagtccgactacccgcatccggaaggctacctggtgcaggcgtacgattcgtcggcggctgacggcaaaggcctgaacaacggcgattacaaaagcgaccagttcgacgcactgatcgaccaggcctcggccgaaaccgatctggacaaggcggtgagcctgtaccgacaaagcgaacgcgtgcttttggaagacctgccggtgattccactgtggtataccaacgtcaccgcggcggcggtcaaaggcgtgcaggtggactacaactacatgggagtcccggagtacaacaccatcgtcaaataacaccttcagcagcgtgacggagactccaccataagcgcaaatcacacacccgtcgcttcgaagcggtaggctgaagaactatagaaaacactgaaaaggagacaaggtgagcaacctaagtgcacccctgcccgttatggccggcgaagacatgccggcagggcccaccgatccgattttcaatcgtctgctgaaggaccgcatcatctggatgggtgaggaagtcaaggacgatatggccaatcgcatctgcgcacagatgctgatgctggccgcagaggacccgaagaaggacatctggctgtatatcaactccccgggtggttccatcaccgcaggcatggccatctacgacaccatgcagctcattgagcccgatgtggcgaccgtgggcttgggcatgtgcgcgtccatggggcagttcctgctgagctccggcaccaagggcaagcgattcctgacgtcgcatgcccgcgtgctgatgcatcagccgtccggtggcatcggtggcaccgccactgacgtgcgcatcaacgccgaactcatcatggacatgaagaagaccatgagcgagctgaccgccgagcagaccggccacaccgtcgaggagatttaccgcgacaacgaatacgaccactggttcaccgcgcaggaggcgttggagtacggcttcgtagataagctcgtttccacgcacgacacgatgagcgccaccaagggagagtgatcatggcaagcgaagaagcacagttcgtagcccgcgccgagcatcttgccggcccgaccggcgtggttggctttcagacgcgcgccgcacgcgaggccgcattcgccccgcaagaccgttatgtgctgccacagttcgaagagaagactccatacggcttcaagaggcaggacccgtacacccgcctgttcgaagatcgcatcatcttcatgggcgtgcaggtggatgacacctccgccgacgacatcatggcccagctgctggtgttggaaagccaggatccgaatcgtgacgtgatgatgtacatcaactctccgggtggttcgatgacggccatgaccgccatctacgacaccatgcagtacatcaaaccggacgtgcagaccgtgtgcctgggccaggcggcctccgcggcggccatcctgctggccgccggtaccaagggcaagcggctgatgctgccgaacgcccgcgtgctcatccatcagccggccatcgaccaaggtttcggcaaggctacggaaatcgaaatccaagccaaggaaatgctacgcatgcgcgaatggctggaagacacgttggccaagcataccgggcaggacgtggagaagatccgtaaggatatcgaggttgacactttcctgaccgcggccgaagccaaagcatacggcatcgtggacgaagtgctcgagcatcgttcctgacggttcgtatcggtccgagcatatcttcacaaatcaatgcccctgcacccaaccggcaggggtattgtgttttctcaacacaaggatttcgaaaaggggtgcgaatgggacgtgtggtcgactacaacgacgcagcgccaagatgcacgttctgcggcaagtccgagaatcaggtacgcaagctggtcaccggttcgggtgcggccatctgcgacgaatgcattgaactgtgcgtggacatcatctccgaggaacgtgtcaaagacgctcagatcaatacgttgcagttgcccaagccggcgcagatcagtgcctacctcgacggttatgtggtagggcaggaggcggccaaacgcacgctgtcggtggccgtatacaaccattacaagcgtgtcaacatggagatgcgcgaatctgccgagttggccgattccgccacgcggcgcaatcagtccgatcctttggctgacgtgcaggtagccaagtcgaacatcctgctgctgggaccgaccggcgtgggcaaaacctatctggcgcaaacgctggcgaaagtgatgaacgtaccgttcgtcatcgccgacgccaccacgctcactgaagccggctatgtgggagacgacgtggagacggtgttgcagcgcctcatccaggctgcggacggtgacgtggcgcgtgcacagcaaggcatcgtctatatcgacgaaatcgacaagatcgcgcgcaaaagcggcgagaacacctcgatcacccgcgacgtatcgggtgaaggcgtgcagcaggcgttgctcaagattctggaaggcaccatggcgtcggtgccgatggaaggcacacgcaagcaccgcgaacaggaaaccgtgcagatcgacacccgcgacatcctgttcatctgcggtggcgccttcgtagggctggacgatatcgtggcgcagcgtcttggtgccagggaaagcggtttcggtgcggcttggcatgaccatgaggtacccaaacgtgagttgctggcgcaggccagcgccgacgatctggccgatttcggtctgcttcccgaattcatcgggcgtctaccggtggtgagcgtgctggaggagcttaccgaagacgacctggcccgcatcctcacccagcccgaaaatgcgctggtcaagcaatatcagaagctgttcgcagtggatggtgtgaagctcacgttcaccgaggaagcggtgcggcagatcgcggccacgtcgattcgtcgcggcaccggcgcccgaggactgcgttccatcatcgaaaagaccttggaagatacgatgttccaattgcctagtctggatgatgtgtcggaagtgatcgtggacgccgcctcagtgcatggcaccggcactccgaaatttctgcgcaccccgactcaggagattcctcggcgtaaagcggcctgaaccctgtgaatcgcagcgacacgccgaaattttgactcaagggtgtttgggtgtatcttattcgagttgccaaaaacaagcaacgttgcgcgagtagcccagcggattagagcagctgactacggatcagcaggtcgcaggttcgaatcctgtctcgcgcaccagccgccgatcatcaggcggcgcaaacaaatgagatgatgttgcgcgagtagcccagcggattagagcagctgactacggatcagcaggtcgcaggttcgaatcctgtctcgcgcacaaggacctccttcgcgaatgcgttggaggctttcttttttctcagaggtatgctcacagccaacgccaagggtgttcggtacactggtgtacggcatttttacgtacgatttggccatattgagaacgcagacaaggagcataatgaccgcagaaaagcaaggactttgggtgaccatacggcgcatcgccgcctccgaccgcatatccggcctgatcatgctcggtttcgcccttgccggtctgctgctcgccaacctgccattcacggcgcacgccttcgaacaacttgaggaattccgtatagcgattccgcgcaccaacatcgacatgggactcggacattgggtgcaggatggtttgctgaccgtattctttctgacggtcggtcttgagctcaaacaagaacttaccacgggatcgctgtccaatccgaaggccgcggccgtgccgatgctgtgtgcggtgggaggcatgctcgttccgccggtactgttcatcgcggtcatcgcgttgttcgcgcatttcggccctggcggagtgggggagctggtcatcgcttccggcaccgatttttccttcggtgagatgtctcatgggtgggcggtgcccaccgccaccgacatcgcattctcgctggccgtgcttgccctgttcgccaaggcgctgccaggttccatccgtgcattcctgatgactctcgccacggtggacgatctgttggccatcattctgatcgccgtgttcttctcgtcggtaaacgcttggtactggttcatcggcatcgccgcatgcgcggtcgtctggtattttctggtgcgtatgcagaaggtgccgtggcttgccgtggccatcgtaggcatccttgcatgggtcatgatgtttgaagcgggcattcaccccacacttgccggtgtgttggtggggctgctcaccccggcccgtgaacgattcggcgagaaaagcccacgtgcggaacggtatgcggataagctgcagccgttctccgcactgttggccttgccgatcttcgccctattcgccaccggcgtgcatttcgaatcgttgacttgggcgctattcgtctcaccggtggtaatcgccgtgatagtggctcttgtggtgggcaagcccttgggcattatgatcaccgcatggctgtccacgcatctggccggccttaggatggccaaagggcttcgtgtgcgtgacatgtttccggcggcatgcgcgtgcggcatcggattcaccgtatcgttcctcatcgcctcattggcatatcaggatgccgaactgtcggcggaaagccgttttggcgtactgatcgcctcattgatcgcggcggtgatctcaggcattctgttgagtcgtcagtccaagcgctttgaggccgcacaacggcagtcttccgaaacggacgaccggtatgccgatgacggcaccgatgatgaggttgaaaccgtgctcgaagacggcaccattgccgtcagccaaatgattggcacgcggaacgagacgaagtgatacgcagcgcccgttgccgggcgccgacacggtgtcatcgtttgacggctacaagaagaccggtgccggtaggggtgagcgtggtgacgaaacgttcgtcggattccacggtttccagcagtgcacgcatggccacggatttggcgtccctgttggcgggattcagtacgccacccgcggattcggccgattcgaaagccagcatgtcggtgaagacgatgacaccatgggatttgagcaggcggggcgcctgttcaaaggaagcgtcatagttacctggatcgccggcaacgacaatcagatcgtaggtttcggcattcaaccgcggcagaaacactcccgccggcgcgttcaccgcacgaagcgtggtctgaatctcatcggataggtgattgaacaaagtacggatgagcgcaatgccttgggaggaggaatcgacggcggtcagttggccaccgttttccaagccgttgaccagctgtaatgtctccactacggaaccggtgccgacggcgattaccgatgaggcgccaatcatatgcaccagtacgcgcaacagctcggcctgagcggcggatccctgcgcgataccagtctcctcggcacgtgtgcgcaccgcattcaactcgacggactggcgtgagaacgcatgatcctcaacaaactcccaggctttggcgagattggtgtacgacgttctatccatgactttcagcgttccttgatttgggcgatcagctgccagatttcctcaccgacgtcaatgccacgcgggcattcacggctacaggcgcgcaccgactggcatgctgcgatgccgtcggctgaatcgatggcatccatacgcgcagaggcctgcgtatctcgtgaatcgttgatgaaacgggaggcggtgatgagtgcggccggaccgatgaaggcttcgccgccggcatataccgggcagctaccctcacaggtaccacacgcaatgcagttgctcagctgttcgtatttggcgagttgttcggggcgttgcagatattcgaacgcatcgatcttaccttcggcggtggtggccagctcaccgttcgcctgcagatatggcttgagccttctgatctggtcaagcatctggtcgatgtcggcaatcaggtcgcgctgcaccggaaagcccggcaatggtgccaactcgatgacgccgagactgccggaatcatcggcggcaccgtcttcgaccgccacggcatctcccgtatggcggaaaccttcgtcatcgaccatggagctattcggctgcttggcccagtccttgatggtcgcagtgcacaacagggtgggggtgccgttgatggccacggcgtcggatccgcacatgccatggccgcaggagtagcggaaggcgagcgtcgggtcgatggtgcgtttgatgctcagcaggcaatcaagcaccgtatcttccgggcgtgcattcaacgtatagtcctgcacccactgtttgccgcgaggacggcgccgcgacgatgcgcccgagtcgccgaagggtgagcttttctttgcgaacgggctgccgccacgaccgcggtcgcgatccgggcgcggaacgaaccgattcacgcgcaatgtcaccgtgctcacgccgtttcccatatcgctcatgtacccgcctttccgatgaaaaccgtcaaccagtttgccatatgctgtgcccagaaacactaatattcacgggtttttggcggcatgtccacaatatgcacgggctgccaggagacctgaccgtccgcatcgaccatggaatgggcgaggaaatgctcgtcgtcgcgttcagggaagtcgaggcgcttcagggagcctcgggattcatggcgtgcatcggaggccttcagtacggcttcgcccagctcgatgagatgacgcacctcccagatggcggtaatctcctgattgaaggtcggtgcatcggaatgcgcgtgcaaccgttcggcccgtggctcaagctcgtcatgcagtacggtgagcgcccgctcaatgccgtcctcgtcgcaacgtacggcgacggcgcgctccatcaccgatcccagattggccatcagctgatatggattgtcccggcctgcttcgtcatcttccggtgccgtcaccagcagatccttgatctcggcggtacgtgcggaggccgttcgctccacgacgtcgactccggcatcttccatcggttcctcagccatcggatcattcaccggatcattgacgatgcgtgccgccatcgcctgaccggaacgggtgccgaacaggcaggcgtccagcagggagttacctcccagtcggttcgcgccatgcacggatacgcaggaacattcgccggcggcgaacagtcccgcgaccgtatgacgttcgtcaccgtgccagcggtagacctcgccatcggtacttacgggcatgccgcccatcgtgtaatgcgcggtcggcttgaccggtacgtagtgcacggtcggatcgaggtcggcgtacttctcaatggtctcgaccacctgaggcagtacctcgtgcatgtgctgggcttcgatgccggtcatatcgagccatacgcaatccttcgggccttccggatccttcggatcggcgactcctcgccccgcgtcgatttcggccatgatggagcggcttaccacatcgcgggcggccagatcggcatgccctggcgcgtaacgttccatgaaagcctcgccatcggcattgcgcagcacgccgccttcggcacgagccgcttcggacagcagaatgcccgtatgcgcgagcccggtcggatggaactgcacgaattcggcgtcctcaagctgcagcccggcagtcaacgccaatgccatgccatcgcctgtcagatcccaggaattcgaggtggtgtggaacaaccgtcccgcaccaccggtggcgataagcacattgcgtgcatgaatggcatgcgccacacccttatgcgtgtcgaacgccaccacgccttcgaccttcgaaccgtcctgtgagacgaccaggtcggtcacataccattcctcggcgaattcgatgccttcggccacgcactgctgccacagcgagaacaggatctggtggccgatgcggtcggccgcataggcggcacgacggacgggtgccttaccgaaatccttggtatggcctccgaaacgacgctgggcgatatggccgtcctcggtacgggagaatgccacgccggcatgttcgagcgcgatgacggtggcgggggcctcttgggcgagcagactggcggcatcctgatccaccagccaatcgccgcccttgacggtgtcgaaataatgccagtgccagtcatctttctcgacattgcccaggctggcggcgatgccgccctcggctgaaccggtgtgcgaacgcaacggctggagtttggaaaccactaggatgttcgggtcgatgcctctggccttcaggtcgcgcatctgttcgctgcgcagcattcccaacgccgccgacaggcccgccgcgccggctcctacgattaccgcatcatacagattttcaacatgcttcggactcataccaacgattctcgcacaaggtacgacgaaacggcagagccctcgtgtggatcgcgaccttacgcaccgccggatgcgatggcgatccgccccgcctccatggtgatgatgccggaaagctccaatgcgccaagctcctgcatgatcgccgcgatggagtattcgtccggatgcgattcgttcagcatgtcgaggatgccgtcggccgacacggtgccgtaacggctgcggcatgcgcgaatggcatgcaggatgtcgttgccggccgtgttcgtgccatcgtcttccttgcagtggtccgggtcgtcggatggcgggaggtcttcggctttcgacgatgcggtgatatgcggccgatgtgcctcatggcacagttcgccgatgtcgctcagcgagcagacgattgacgccttgccgtcctgaatgagccggttgcatccggtgttgtggggcatggtgacgtctccgggaacggcgtagagttcgcgattgagctcgccggcccatccggcggtgttcagggctcctgacctggctcgtgcctgcgccacgatcaccgttgacgacaatgcggcgatgagtcggttgcgtaggagaaaacgtcgtgcctccggaatggtcgcagggcatagttcggagaccagggcgcctttgccgtcgacgatgcgttcgaacagtcgcgcgttgctcttcgggccgatgtggttgagccctccggcgaaaaccgccacggttctgccgctgatgccggcaccgacctcatccatggcggccaacgctccccagtgggcggcggcatccgtgcccaaggcgccgccggacacgaccgtatgtccggctcgggccgcttgacgggcgagttcgaacgcgcactggcgaccataatcgctgacgccccgcgagccgactatgcccaccggtttggggcaggagaccagtgcttcaggatcgccacgcccccataggcatagtggggcggcccagtcggtacgcaacgatagatcggcgagttgggatggccaatagggatggtgaggggcgatgatccactgcgtgcctgcggccgtgaaccagcattccagctgctgagggtcgtgtgagggcagcgtggccagacgctgttgccatgacgcgagcgaaccatggaatgaggacatgccgcgagcgttgatggtgcgtccccaccgggtgatgccgttgatgaaggccgcgtccaatgctttgcaggctgcggtgactaccccttcgtgtttgccgggaccgcagtcggcgatcagttgcagagcgctggtggcgctgcccgtacccttcagcagcgcatacatcatggcgtccgcactgtccaggcagtacgtcagtacggcccttgccaaagtctcctcgtcgactggatggagcgtctcattcatgacaacctcgttcgcatggagattccctgcatcatttccgtgggcccgggggaggatttgccggccagatcggcgagtgtccaggcgaggcgcatggcccggtccgccccgcgtaggctgagccgctcgcttgccagagctcgattgaccaatgcgatggccttatgtgaggtattggcgcgcaaccacgtgccggtggcttgcgcgttgcaggaccatccgtattcgcggaagcgttcctgggccatctgtcgggccaccatgacccgcagtcggattgtgtggctggattcgccggtctgtcggcttcccgaatcgatgcggtcgaccggcagcacttcgacttgaatgtcgatacggtcgagaatcggaccggaaagacggctgaagtatttgatgcggtccttctctttgcaggcgcaacgttcgccattgccataggaaaaaccgcaggggcatgggttggcggccatgatgagctggaatcgggctgggtagtaggtggtgcctttcgaacgcgagatcgccacgtagcccgactccaacggttcgcgcagcgtctgcaatgcgcgtgcggaaaattccggggcctcatccatgaacaggatgccacgatgcgccctggtgatggcacctggttgggccaatcccgttcctccacctaccaaggatgccatggaagcggtatggtgcggcgcttcgaatggcggaacatcggtgatgccatagctgggcagcgtgccgcagagcgaacggatcgaggcgatctccagttgctccgtctcattcaacgggctcatgatgccgggcatgcgagaggcaagcatggtcttgccggtgccgggagggccggtcatgagcagatggtggcctccggccgccgcgacttccaaagcccatttggttgattcctggccgacaacttcgcacatgtctccgggcgcagagcattgggtgacgtccatactggttccgatatcgcgctgggtgtccggtatatggtatgtggcatggcctcccatcagttcgatgagttcgcccacatggcgtacgccgatcacgtcgatgtcgtcgatgagccgggcctcgtcgatgttggcgtggggtacgatgacctgccgtatgccttgttcccgcgcatgcagcatgatcggtagcaggccgttgacgggaagtacggtgccgtcgagattgacttcgcccaatacgatggtgtcagccaagcaatcatgcccgatggtgccggatgcactgagtacgcttgccgcgatggccagatcatgcgaggatccttttttcggcatggaggcgggggagagatttaccgtgacacgggtttcgggccatttgaagccgctggcctgacatgctgacttgacccgttccctcgcctcggaaagtgaggtgtcgggcagtccgatgatggaaaaatacggtaggccgggggatatgaaggcctgaatctggatgatgaaggccttcagtccgatcagaccgactgacaatgcgctgccgatggccatcagaacgctccttcgatatgatgcaccagcggtctgcctgcgcgtacgatgacggtgatgacgtcgaagcgcaccccattatggggaacgcggtgactgggttccatcagccattgcaccgccgcatgtcgcaggttgatctgcttggaagcggtgaccgcctcctgcggggtgccatagcgaagggtgcgtctggtcttgacttcgacgaacgtgatgcaacccgcttcgctgcgggccacgatgtcgagttcgccataacggcaatgccagttacggtcgagaatgcgccagccgcggcactgaagccatgcggcggcgtattgttcgccgagcgcgccgatttggcgggtggatagcgtgccgtcgtgcagccgctgtgcaagagaatcaaggggttgctccgatggcggcgtcgcgaccggaagctcgggtgtgatgttgccgttcatgattcaagtggaacagagacggatgtcccgaggcaaggccgaatggcgaatgtggataagtcgaacgtcttcgggcgtgttgtggattgccggtggatggcgatcatcaatccacaacaatccacaacacgcccgaaccatgagggagcatcgcggaaggactaacggcgcacgagtcccgtcagctctcccagattcaattcgaagctgacgccacgttcgtcgtggtgcggctgatattgcgtgctttccatggcgtgacgtacgaattcgccggcgatatacgcggattcacccagagacctgccggccatcacagccccgcacagggccgaggcgaacgcatcaccggtgccatgtgtcatgaacggaagcttgtcgtgtgccagttcctgcttgcccgaggctcccgatatcgcggacgcgacgtagttgcgaatcttgccgtcgttgcgatcgattcccttgagcactacgtttttcgcgccgcgtaacagcagtgcgtcgatgatgtcgttcacctgggcatccgaaatgttctgtccgggatatgcgcggtccgtcagcagggaggcctcggtcagattcggcatcagcacatccgcgccgtcgaccagcgaacccatcgcctcgcacagttcgggcgtgtaggtggcatagatctgcccgccgtcgcccatcaccgggtccaccaatcgcaaggcgtgcgggtattcgtcatacagacgcctgatgatcgcgacctgatccgcggaaccgaggaagccggagtagacgccgtccaactcgacgttctccttgcgccatgcatccagataaccgtccaggatctcggtcgtatcgtggaacgtgaagaccgtatagcgcgtatgcgcggaaaacaacgccgtcggcaccgggcacacgtcgcaaccggccgccgacagaatcggaatggccgccgtcagcgaacatttgccatagccgcacatgtcatgcactgcggccacacgcggaatgtactgtgggtcacggtcgtacagaatctcgtcgctcatatcgaaacctcttccgtcggtcatatctgttgaacgactttagccggtgcgttgaccttgggaggaaaccgttttcggcgccacggattcgattcgccccgacatcggcgtgtcgtcggcctgtgcagaaggttttcgaggtgaacggcaaggtgggaagccaatgattccaacgctttataaaggggtataggtaagcgcgataacgttcggcttgcgccgggcttcacccccggtttattgtcgctagcaacacccgaccaaccgccaagcgcacggcagggcggaaggttgaatatcaggcacgaatccatccgaaggagaccaccatggcaaacgagaactaccgttttgagacgctgcagctgcatgtcggacaggagcaggccgacccggccaccgactcccgcgcggtgccgatctaccagaccaccagctacgtcttccataacttcgatcacgccgaggcccgcttcggtctggctgacccgggcaacatctacggccgtctgaccaactccacccagggtgtgttcgaggatcgcatcgccgccctcgaaggcggtaccgccggcctggcggtcgcttccggcgccgccgccgtggagtatgccgtgcgtaacatcacccagagcggcgaccacatcgtggcggccaagaacatctatggcggcaccttcaacctgctgcgtcacaccctgccgcgcgacggcatcaccaccaccttcgtctccgccgagaacccgcaggagttcgaggatgccatccaggagaacaccaagctcgtctatttcgagaccttcggcaacccgaacgccgacctgccggacttcgaagccatcaccgccatcgcccataagcaccatctgccggtgatcgtcgacaacaccttcgccacgccttatctgttccgtccgctggagcacggcgcggacgtcgtggtggagtcggccaccaagttcatcggcggccatggcaccaccctcggcggcgtcatcgtggaaggcggcaacttcaactgggccgaggtgccgggcaagttcccgaccctgaccgagccggatccgtcctaccacggcctgaacttctacgaggccctcggtggtgcggcgttcgtgacccgtgtgcgtgccattctgctgcgtgacaccggtgccaccctgtccccgttcgcggccttcctgctgctgcagggcactgagaccctgtccctgcgcgtcgagcgccatgtcgagaacgccctgaaggtcatcgactacctgaagaccgttccggaggtcgaatccatctcccatccgtccatcgaaggccgcaaggataacgatctgtacaagcggtacttcccgaacggcggcggctccatcttcaccttcgacatcaagggcggcaaggatgcggcacgcgtgttcatcgacaacctgcacctgttcagcctgctggccaacgtggccgacgccaagagcctggtgatccatccggcctccaccacgcactcccaggagacccttgaggagctcgaggaccagggcattcatcagggcaccatccgcctgtccatcggcatcgagaacatcgacgacattctcgatgatctgaagggcggcttcgaggccctgcgtgcctccggcctggccgagtgaccgacctgcgggacctagcgaaggggtggttccgcatgcgaccgtaaggtcgtaggatgggggtcccgtgcttcctgcgaagcgcgggacccttcatgttgcccgtatgtcgtcggtaaaacggatgtgatggtttgtagcatggatggtatatcatctcgattgccacgaaaaacaatatcgattttttatcttttgaataaaaaaactagaattcatttcaaaatatatgatattgattgagatattgacgatttgttaaagtgagaaagaaggtatccatggccactggaatcaagaagacgctgcgggccaacatcattccgctcatcgccatcatgacggccgttaccaccgtgctgaccatgttcgtgaagatcccgaccccgacccgtggctatctgaacctgtccgacaccatgatcttcttcagcgcctatgcgttcggtccatgggtcggcggcatcgtcggcggtctcggtccggcattgtccgatctgatttccggatatccgcaatgggccatcttcacgttcgtcatcgatggtctgcaggcggtcatcgcagggttgatcatcagggagttcaagccattcaacatcatcgccggttccttggtggccggagtgtggaaggtgttcggctacttcatcgcagggggcatcctgtccggcttcggtccggcgcttggggagattttgggaaactccttccagatggtggttggcctgattgtgggactggcgctgttttccgccgttcgcaaagcgtatccgccgttggcgcgaatgggcaatctcggcatcaagaccagtgagtgagtgatacattattctgagaaagatgtcagacccgtgggattcaccgttgaatggggagcccacgggttttgcttgtcggaatctgaacgaagcgtgtcaataggagcatggggtgagtggcatgatcacggttcgcgacctagggtggaagtatgcgccgttaacggacgggggtaaggccgtcgagagtctgaggcatatcgacttcgatgttccatccggctcgttcgtaggcgtcatcggcccgacgggagccggaaaatccacgttgtgcatggcgttggccggcatcatccccaatcttgccgatggcacgatgagcggcaccgtcgtggtcaacggcatgaacaccgcccgatactcggtctcgcagctttcccaacacgtcggatacgtgcagcaggatccggaatcccaactgttctgcgcctccgtagaggatgagatcgccttccccttggaaaaccgaggcattgaccccgaaaccatggaccgtcgcatcgatgacatgcttgaactggtcggcatgaccggttaccgcaagcgcgtgcctaccagcctgtcgggcgggcagatgcagcgtgtggccatcgccgcggctctggcggccgaacccgacgtgctgattctcgatgagccgaccgccgcgctcgatccggagggcaagcaggaggtgttcgacgcgctcgagcgcattcgccgaacccgtcagctgaccgtggtcatggccgaacaggataccgaacatatcgcacgctgggccgatcaggtgctgtttctggtcaatggcgaactcgtgcgcaacggcgacgcgcgcatgttcacccgtgaacgtgccatgcttgaatccgcaggcgtcgaagtggcggccgacccattgccgagaatcgttgcgatgccggaagcggccgccggcgaacccgtcatcgccatggagcatgtgacgcatcgttatacggaaggaggcaacgcttccgcagcgcttgacgacgtgagcgtccgcatcatgcccggctccttcgtcgggctcatcggccgaaacggttccggcaagaccacgttagccaagcatctcaacggtctgctcaaacctgaccgcggcaccatcacggtggatgggcttgacgtggcgaagcacagcgtaggcgaaatggcggcacatgtcggcttcgtgttccagaatcccgaccaccagatcttctgctccagcacgcgcgaagagatctcgttcggtcctacggcactcggattggacggtggaaccgtattcaggcgggtggatgagatgatgacgctgttcgacctgcaccgctatgaggaagtgtcgccggccacgcttggctacggtgaacgacgcgcggtggcattggcttccgtactggccatgcgcacgccgattctggtgttggacgagccaacggcaggcctcgatcacaggctttcgcagcgtttccttggcgcaatcaaacggttgaacgagcagggcaccaccatagtgatgattagccacgatatgcgtgccgtctaccgatactgctcccatgtgctgcagttgcaggatggccatgtcgtgcagttcggtccgatagacaaaaccggatcggcgcagcatccgcaagccgaccagcacgaacggcatgaaccgatcacgaatacgcatggactcagaaagatctccaaacatcacaacaagacagggaggaagcgctgatggacgccgatctgtatgttcccggcgacggttggctgcatcgtgccgacccgcgcgtgaaattcctcatatccgtagccatgctggtactgtgcctggtctggcgcaactggatgttcatcgccgcgattctcgtcatcgagcacatcatgctcgtcaccgaccatgtgcctgcggaacgtatcgcctgggtgtggaagatccttgccctaatcatcgtgctcatcgttgtgctatggccgatttttgacacttccggcacacatgtgctgtggcgctgggggtggttgaggctcacccaggagaacctgctcatggccgcggtgatgggcctgcgcatcccggcactcggcttcgcctgcttcatcacgctgttcaccaccgaccagcccaaattcatccgtgggcttgtctcattgggagtgccgtacaaggcgggcctcacccttgccaccgcgctacggtacattccggtgtttttctccatcttccagtcggtctcggccgcacagcgcgcccgagggctcgacctcagcggcaaggtcaccgcgaccggcaggaaacgcaatgcggtcgtacgcatcgtcgaccgcttcacatcatatctgccgatcatcatcgccgtactcatccgtgcctacaagatgagccaaagcgtgggctgggccatggaatcgcgcggtctcaaccttacgggagtcaggcgcacctatcgtgtaaaactgcatatgcgtgcgcaggattgggtaatgttgctcatcaccgtggctgcgatcgtatgcagtgtatggttaatgatatggctctaatgggggtatgcgatgatgcaggaaatcaaccgtatggcaatcagcgcccgtgatctcaaagtggtttcggccctgcaatgcaacggacgcatgaccatgcaggcgctcgccgacaaggtgggcatttccgtgtacgcggccacggaaagctaccggcgtttgaccgaatcgaatatcatgaccatcgttccggtggctaacccgttaagtttggccaactactgccagatattggtggggttgcgcgtcaacggtcatcgcgatgaggcattggccgcactgaaatcgttgccgcaggtcacctacgtggtctgtgcgctgggcgatgccgacatcatcgccgaggcggtggtgtattcggccgaaggcatggaccgcttcctgaagcatgagctgcgttccctgccggggttgacgcgcatccaggtattctcctgcggacgactggtgcttgacgaccataatgtcagtgtggtcaaccgtcttctggcggcgcagggggagcacggtttcatgacgaaacgcgaggcgagcgtcggcaccgatataccggtgcatcgtctggatgcacgcttcgtgcacaccttcaatcagttgcagaaggatggcagggccagctatgcggcgttgggggagagcctcggcgtgacgcataccgccattcgcgggcgtatcaagaaactggaggattccggggtgatgcacatcatggccaccgtcagtcccatgcgactcggcggattccgccaggcgttcctcggcatcggcgtcaagcccccgtatcgtctcgatgccgaacagctgctcgacatcgacgaggtcacctacgcgatgagcggagtcggactgaacggagccgactatcttatcgagatcatcgccgatgacgatgaggatctgtggcgtgtggtcgacgaatccatccgttccctgccgggcgtcgagcagacctggtgggcatccacggtcagtgtggagaaggaatcctactggttggagccgccgcgggagggcgtgttgctggatgactgaccgtacccctagaggtcatcatactcaaggatgagatgaaaagtcagaccggcgcatgatgtcgggaaacgtcatcgttccctacctttggagatatgtccgaggaaaggaacaatgacatggatatcagggacgtactgcaaaccaacgatacggccatcgaggccgtggacctcgtcaaggattacggccgtggcgaaaacgtcgtgcatgcgctgcgcgacgtgaacgtacgcttcgagcgtggcaggttcaccgcgatcatggggccgtccggctccggcaaatccacgttgatgcatacgctggcggggttggattcggccaccggcggccacatcgtgttcgatggcgacgatctgacgcgattgaacgacaatcagctcaccctgttgcgtcgtcataagatcggattcatcttccaaagcttcaacctgctgccgatgttcaccgcggaacagaacatcctcatgccgcttaccttggccggtgagaagccggaccggcaatggctggccctgctggtcgagacactcggattgaaggaacgtctgcatcaccggccgaacgaattgtcgggtggccagcagcagcgcgttgccatcgcgcgcgccctgatcaccaagccgcagctggtgttcgccgatgagccgaccggcaatctcgactccatatccagtgctgaggtattgagcttcctgaaacgttccgtcaacgagctcggacagaccatcatcatggttacgcatgaccccgtcgcggcctcctatgccgaccgcgccatcgtgttcgcggatggtcgcatcgtggccgatgtcgacgatccgaccgccgaccagatgagtgatctgctgatgaaggaacgagaactctccacgcggaacgcgtccaatgcacgtcacgccggctgaccggcgcattacaacggttcaagaatctgaagaaggaacgacggcaaccatgtggtccatcacaataaaactcatgcgcaagaccagacgcatgctcatcccggccggcatcgccatcatgattggcacggcgttcatcgccagcactttcctgttcggcaacgccatgaatgattcgctttcccgccaggcgacctccatgttcggcaaggcgaactatgcgatcagcccctccaccgatgggttgagtgagcaagcactgaatgacgtgtattctacgaccgtcggtgacttccacctcgaccggatgaacggcatcgaaggcgtcaacggcgtgcgggtcgccttggaaagcggcgtaaccgtctccaaagcaggcaacaatgtcagcggcgaggccatctccaccgcacggaacggcaaactgctgccggtcgacatcaccgaaggcagccggcccatcgacagcaacgaagtcgcgttgccgagcaacatcatcaaacagctgggcgtgaacatcggcgataccgtgacactgacctcgcgttacgccaccgacgacgagggcggcaaggcccaggccgagaacgtgcgggtggtcggcatcacctccgatcccaatggcgtctactcatattatggaggcgcgatcgtggcttccgacaacctcatcgcacggatgcagggagtgagcgacttcaattccgcagtagccaccatggtctacctcgacctcgccaaggacggcaatacggtatccgcgaaaaccatccacgaggtgaacgggcttctgccgaagcatttcagtctcatgtcgcgtcaggaagtcagcaatgcctacataaagagcatcggtgtgggcgaaaccagcatcgtcaccatcttcctgctgtgcttcggcgtgctggccatgctcgtggcggcactcgtcatcgccaacaccttccaggtactcgtggcccaacgtcgccgtacgcttgccctgctacgcaccatcggcgcgaagaaagggcagctgtatgcctccgtgctgcttgaatcctgcctgctcggcttgatcgcatccatgttgggcgtggcgttcgggtgcgcgcttatgggaatcgtgtgcgccagcggcgtcatgaagcagaccatgcatctgatcttctcctggcaggtgttcgtggtgccgatcgcattcggcgtcatcatgaccgtgctcgcctccttgggttccgcacgttccgcgacgtcggtgacccctctggaggcgttgcgtccgctcgaactgaccggtgatcgtcgctccggtcgtgcgcgcgccatcttcggcatgttgttcgtcgtggttggtatcgcgcttgtggcgttctcgatatggcagatgcagaccaccggcgatgtcgatatgctcagcggcaatcggttcgtcgtgatcctgcttgccgccatcgccggtgccggacttgtgtttctgggactcgtgcttaccgccgtcttctggctgccgatattcatgaaaggcgtcggcgcgctggtagcgctgtccggtccctccgccaaggtggcccatgccaatatccagaagaatccgcgtcgcatcgccgctaccggagccgcattgctcatcggcgtgacgctcgtctccaccatcgccaccggtgccgccagtgccaaggagaccatgaacgatgcgctcgccacccgctacagcgttgatgtcgtggctacgggaagtgacatcagccagcagatggccagcgccgtcaaggcagtcaagggcgtggcggacgtcgtatatgctccatccgccaacgtgcagctgaaaggctccgatggcagtgtctccgccagtacgctgcttatcggcgtgaagaacatcggcgagttgcaaaacgtgattcgagcggatctgggcgactccaccatcgatgccggtaccgtgctcatgccgcaatacaacgcgcaaagcggcaaacggatgacgttccgtcagggaaccgccacctttggcactgcatgggatgagaatggcgacacgaaacgcacgctcgaactcaaggtcaaacaggccgactaccggcgcatctccagcgggtacggtgccgtgggattcgtggatgggagccatttcacgaatggcgatctcgatacgaactcgcacacattgctggtaaagatcaacgaaaccggcactacgctcagcggtgtattcgacagcctccaatccgcactctcgaagagcaccgacgcaaccgtatccggtccgatagccgaacgtgcgcagtgggggaagacgattgattccatgatgatgctcatggtgggtctgatcgccgtggccgtgctcatcgcactggtcggcgtggccaacacgctgtcgctgtccgtgatcgaacgcacccgtgaatccgccaccctgcgcgccatcggcatgacccgaggccagctcaggcgttcactgggcgtggaggcgttgctcatctcactggtgtccggcgtggtcggcgtgatactcggcaccctgttcggctggctcggctcgtatgtggtgttcagcatgtacggcacggtggcgttcccgttcgaatggaccgtcaacggcatcgtgttgggtgtggccgccgctgcctcgctgcttgccagcgtgtttccggcgcgacgtgcggtgaacaccccgccggtcgaagcgcttgcagaggcctaggatcctcaatgagcggttctggccgtgaaaccggtccataaccacggaaaccggcctgtttatgacatatctgcgtcataaacaggccggtttccgtggttatgaatcgttttttgcagtgccgatgaaactgtcacaccagatggttttcgtaggcgaagacgaccgcctgtacacgatcgcgggcgttgatcttcgacaggatatgcgccacgtgcgttttcaccgtcggcaggctgatgaacaaccggtcggcgatttcctgattggacagaccgtgtgcgatttcgatgaggacctcacgctcacgatcggtcagttcatccagttccgggtcagtatatgccggccgtgatggtgcagtgtccgccgacgtggggatggtgagggagtcttgatcggtcagcccaccttccatcattctttcaatcagtcgtttcgttgcggacggtgcgatgatcgcattgccttggaatacggtgcgaatcgaattgagcaacgtttccggttcagtgtccttgagcaggaaaccggatgctccggcattgatggcggccatcacgtattcgtccagatcgaacgtcgtcaaaatgatcacacgggtccgccgcgggccggtttgcgctccggttgcggcgaaacgatgttgcaatgaactgatctggcgtgtcgcttcgatgccgtccatgccgggcatgcgcacatccatcagcactacatcgggatgcagtgtttcggccaaggccaccgcttccgctccgtcgcgagcctgaccggcgaccatcatgtcgggctgcgagccgattaccatggcgaaaccggcgcgtaccagttcctgatcgtcggcgatgatcacgcgaattctctgctcttcactcatgccttccaccttatcggcagcattgcgccgtcagcgttggaacataccccgaaaaaaccctgatttcatctgttcgtccaatgaggcagcgggtttgagccgcatctcttcggacttgccggcatgagcctcatcgctgaatccggtctcgcgcagtacccgcagcagttggcgcatatgggccaatgcttcacgcccctgacttccgatggccgcgaacgcagacgcgatcgattccgccgagggctcttcaccgtgtgccttggcttcatcgagcatgcgtaatccggagatggtctggtcgatgacgctgctaagcgtggcggtgacctccgactgaatgttcgtgctgatacgatcccgttccagattcgccgcaagaatcttctgcttgtcctgttcggcgatcaatgcctcctcccttgcctgcaggacgagtgcgttcgagcagctggaacgggtccatcgagccatggcgatgacgcctccgcatgtagccaggacagccatggtgtagaccaggccggtgaatatcgccccggatgtgagccatgtggtccgtctcggctcgtatgtgatgatgccttgtatcaggaaaaccgatatgctcgggtagtcaagcagcgacagcatgaccttcacgccgaccaagagagcattgatgatggagacgagtccggtccaacgccacgctctttcccttccgtacagtaccgccgcatgcaatgcgctcatcgaggccacgatattggcaagatcgatgggttcgaaaacgatcagttgcaacgtggagagtatggctatgatcagcgcgcagctttccgggaatctccttcgcatgcataacggcagcagttccatgacgatcagcatgcgaaatggtagctgctccgggcccatgccgtaggagaacaggctgatcgacgccgagccgaacgtcatgatgagcagcgccgtgacgatggtgtccaccaagacgtaatgccgttgcgtccattgcgaaagccgctccacccaattgaaccgacgtccggagatatcgatggcctgggcgatcggcttggaccgcagactggctcgtatcgtctgcatcgtcggcaaggtcggcaacttcggcgagaggatcgttctcgtctcgccggatgtcccgtattcagacaaccgcatggccggagcgtcggccggcagcccgtcgatcgccatcgacgccgcatgggcgtctttgcatgaggagtgcgaggacatcgcactggcattcgtggcgaacggcaccgtcgcgcatacggcgaacccgcctcctatcctcgggccgaacgtcaccgatcctcccacggcttcgatgcgttcgcgcatgcccgtcaatccgtagccgggcgcatgcccgtccaatccggccgaagcgccacgcccgctatccgtgacggtcacggtcaatgtgccgtcatcccatgattccgtgacatgtacggtcaccttcggtcccgcatatttgcggatgttcgtcaacgattcctgcatcacgtggtagatggccacgcttgtccgatctcccagcatgtcgggacgtgcatctccgatgatctcccgtgtgatgacggtgtcgggtgccacggtacgtgcctgtgcgatcaatgcgtcgatatcggcgtagtcggcatggggagatccgccgaatacgccaagaagtctggtcatgtcatgcagcgcatgctcggattcatgtctgatcgtctccatggtggaacgtgccacgacgggatcgttcgcgccggcgtaccggccaccgtcggactgcacgatgatgatcgacaacgtatgcgccaccacgtcatgcatgtcccgcgcgatgcgtgcacgctccgccagcgccgcgatattgcgctcctcgacctcgcgcgcggcaatcgcgtcattgcgttcctgcatcatccgtaccgtcatcagacgggcacgctgccagtaggcgatgatgatcgtcgacgccaagcacagcgcgatggcgacgaacatcatgaccatgtactgcagtatcgtatcggtgcagtcgttcgacaatccccgaccggaatagacggtgttgcaggaggagagaccattcagtaccgttgcgtcgacggcggagaactgtccggtgcccacggccaggatcggaccgaccgtcatcgcccagcccatgatgattgaggccaggccatcgacggcgaatgccagcacgatgaacaccttcgaattatgcgggttgccgtacagaatcaccgaatacagcatgaacgtcgcaaaaaaatcggtgatcagcatgcatgggccgagcaatagatgcagcaacaccagtaccacgaatgccaaggcactgatctgaggccatcgccggcgcgtgatgagcggaacgagcaacgcgatcgaccagaccatctgcacctgcgccggatagttatacagcagtccgggattgaactcgatgttgttgccaaggccaaacatgaatagggcgagcaatgcggtgatgatgctgtctgcgacgatcacatggccgcgaatccacgaaaacaggcgctgcagtctagtcatagtggttcaagcgtaacgcgcggctggccattacggtatcatgcgcaggtatgagacgggcctgccgtgtatggtggaagatccagcgaccctttccggcgaaaggcaagggtgacggcgacgtcgacgggaggaaatgaatgcaatcgaacccacatgccgtccttgtcgacgatgcgcccgccgttctgttcgctgcagaagggatatcaggaaaggtggatgcacgatgacgctgctgaccgagtattacgtgcccggattgcatgttgaggaccattcgatcaaagtgccgttggactggtcgggtcatgaacccggccacggtttcgatggcccgtcaatcagcctgttctaccgcgtcgtcaccgctcccgaacatgtacatgatgagcttccgttactgattttcctgcaaggcggccccggtgggtgcgggccacgtccgctcaacccgcagtccgacggctggatcgaggaagccatcaggcatttccgggtggtgctgcccgaccaacgcggcaccgggcgctcatcccgcatcgatacgcacatcatgaagaccatggatggcgaagcgggagccgcattcctgaagcatttcctcgccgattcgatcattcgtgatttcgaacacctgcgccgtaccgaattcggcggcgcacgttgggccacgctggggcagagctatggcggattcctgacgttgacctacctgtcgctattcccgaggggtgtgatcgccagctttaccaccggtggcattccgcacgtacccgccgatgccaccgacgtgtaccgccacaccttcccacgtatggcatcgaagacgaagcggttctacgagcgttacccagtggatgtggaacgcgttgccgcgctcgccgacattctggattcacgggagatcgttttgcctaatggcgatccgctgaccgtagaacgtctgcaatgccttggcgccgacttcggcatgaagcccagtctcgagcgtgtgcattggatgcttgatcaggcattcctggacggtgacggttccgtatccgccggatccgaagtgtcggatgaatttctgcatggcgtcatgaacgccacgtcatcccgccctctgtattggccgttgcaggagttcatctatgccaacggcgagctcgatgagccgattcgatgggcggcgcagcgcgtgcgtgacgagcatccggaattcaacacggatgtgcgtccgttgaacttcaccggcgaatgcatgtttccgtggatgttcgaacgggagaatgcgcttcgaccgttcaagccggccatggacgtgctcatggaggacacgcatttcgggatgatctatgatgccgaccagctggcctgtaacgaggtgccgctgcaggccgccgtctactatgacgatatgtacgtcgattccggactgcagctggacacgttgtctcgcgtggcccgttcacattactggactactaatgaattcgaacatgacggtgtgcatggctccgtggtgttcgagcacatcttcaacgaggccctgaaccgcggtgacctgcaggaactgttctagacgaaggaaagaagcaatgaccaatccaaccatcggattcatcggatacggcaatatggcccaagccatcgcttcgggcatggtcgacgccggcgtggtgaacggcggtgacatcgtggcctgcgccgcacattatgacaagctcgaaaggactactgccaagctgggtgcgcggccgttgcacaccgcagcggaagtggccgaagctgccgacgtgatcgtcatcgcaatcaaaccgtaccaaatcgaaagcgtcatcgggccgatagcgaaggagctggccgaaccgggcaagatcgtcgtgtccattgcggccggctgggatctgaacaaattccgtgaactgttcggaaccgacttcgtcgatgcacacgtccaatgcaccattccgaatacgccgatggccgtcggcaagggcgtgctcgtcaccgaaatcgccaatacgctcaccgaagcgcagaccgagaccttcgaacggctattcgcgccgatcagtctgatcgagcgcgtcgacagcgcgcatatgggcatcgccatgtgcattgccggctgcgctccggctttcaccgacatgtacatcgaagcgctcggtgacgccggtgtgaaatatggcctgcagcgcgccaccgcataccggttggccgccaagatggtcgaaggcgtcggtgcgctttacctggccagtgaaacccatccgggggccatgaaggatgccgtttgctcgccgggcggcaccaccatcaagggtgtggcgtccctcgaggaaagcgccttcagaggggcggtcatcaaggccgtcgacgccatcgaagcctagagctaagctagggaaccatgtctcttactatcggaatcgtcggactgccgaatgtcggcaagtccaccatgttcaatgcactgacccgcaacaacgtgctggccgagaactatccgttcgccaccatcgagccgaacactggcatcgtgccgttgccggacgatcgtctgccgatcctggccaagctcgtgcacaccgagaagatcgtgccggccaccgtcaccttcgtcgatatcgcaggcatcgtcaagggtgcctccgaaggcgaagggttgggcaacaagttccttgccaacattcgtgaggccgatgcgatctgtgaggtcgtgcgtgctttcgaggatgatgacatcgtgcacgtcaacggcaaggtcgacccagccgatgacatcgacaccatcaacaccgaattgatcctcgccgatttgcagaccatcgaaaacgcattgccgaaactcgagaaggatctgcgaggcaagaagatcgacccggcctatatggcggccgtcaaggaggccaaggccattctcgaatccggtgagaccatcgacaaggccgctcgcgagggtcgcttcgacaaggactccgtctacgatctgcacctgatgagtgccaagccgttcatctatgtgttcaacgtggacgattccgaactgcagaacaaggaattgcaggacaagctcaccgcctccgtggccccggctccggccatcttcctcaatgcgcagctcgaagccgatttgaccgagctggacgaggatgacgcccgtgagatgctcgccgatgcggggttggaggagtccggtctcgaccagctggcacgcgtgggctatgacactctcggcctgtctactttcctgaccgcaggagaaaaggaagtgcgcgcctggcagattcacaaaggctacactgcaccgcaggccgccggcgtgattcacaccgatttcgaaaaaggcttcattaaggccgatatcgtttcctatgacgatttcgtggctgccgaaggctccatgacgaagatcaaggaggaaggcaagctacgccaggaaggccgcgactacgtgatgcaggacggcgatatcgtggaattcaagttcaacgttagcaagcactgattccagtgcttcggaaacggcttgtttccaacggtttcgggcttaccgaccgttggaaacaagccgtttttgaatgcgcttgaaatggcggttcctgccacgtttcgggcggctgttgccaacgtaagagtgcttttagagtgctcttgcgagggctgctggaacggcttgcgaaggcactccctcaacgaaagggaggaatcatggccacgaggaagaggacgtccggatcgggcagtgtgttcaaggacgggaaaggcgtctggcgtttccgcaaggagctgggcaaggacccggccaccggcaagcggcgcgtcatcgaagcgaagggtcgcatgaaggccgaggcgagggaacggttcgaagcaaagctcgccgaactggaacgcacgggactgctgccgggaggcaaaagcccgtatttggttgactacgcggaccgttggctggcggactaccggacccgcgtcaagccgaccacgtaccgcacccgcgcaggcaggatcaaggcgtgcaccgacgtgatcggccacgtgcgactcaaggacatcacgcccgagcacatccgccactgcatgcgcacgctgggggagcggctcgcgtccagcaccctcaaagaccattacgtgagcctcaagatggtgctcgaccaggcggaactcgaggagctcatccccatcgacccatgcaggcgcgtcaagccgccacgcgtcgaacgcagccagacgcgcatcctcgacgaggagcagcccggacggctgatcgccgccgtagccgacacgaaaacggccagacgcggccccgccgacatggacgacatgaccgaaacgtggatgctcctgttcgagctcgcgttcgccgccggcatgagggaaggcgaacgatacgcgctcatgccatacgagctggaacgccgtgacggcgttccaggcatccacgtacagcagcagatccaagcctatggcctgcccgacaaggccgtcatcccgaactggcttaacgcgagccacctgtacggcatcctgtggctcaccacgcccaagacccatgccgcgaaccggttcgtaccgatcggcgaaagcctgtggacgcgcctgtgggcgcgcatccaacggcttcatatcggccctcgtgagctgatcttcacgaaccagcggggcaatccgatacgcgaaaccaccgaagcctaccattggcgcaaggcactgcagacggtcggactgccacaggtcaggatccacagcgcccgccattggaccgcgaccatgaccgcacaatccggcatgcccgacgacgcccgcaccgcaatcatgggccacaccagcctcgacatgaccgcccaccacacccactggcagccgaaggcgctcgcatttgacgccgtatggggtgccgcatccgggatcccggtggtgggcgtggatgagttcgtggacgagcgtgcagtattcctgtctcggattgagccagtctgccagcagcatcagccggtgtcggtcatcgtacaggccgcacgtattgtgtggcaggtcacgcgacattatcgacaggcccaaagattccgcgttgctgcgaaggcttgcgatggtcttgttgtgcacattcctctctttcgaaagcgttgctttacggaaagcgtctttttgctgtttgccaagtcgtatttgacagttggagtgttgtatgtgctgcttgagccagctcatctacaggttgtagaaggagtcttcggagtcgtccttaatgggcggctctagttttttattgaattcttgtgctgaatctggaactgtattccttttccagtttgtttatgctccatgaatagttcacgtggtatgccgttatgagcacccagtaatcttttcgttctcccaatacgacgagatattgctggttcggaagattgcgacatcgcgtgcagctggggcaggcagaagctcaccggctttgacccggatggcatgtccgaacggtgggaccagtgcagggcggcgatcgaacacaggctcaccagcgatgaatacctgcgtacgcggacttcaccggaacaacgattcgataattggcggcgtaaccggatcctcgccgagatgggcacacgggacaggacatgggtccacgacgggaccatcccaccggtcacgtatctcaagccgagggaacgcatcgggaagaacgagccacgtgacctgttcgccatagacgccttggcggggaacgggttcgccgtgaccacgctggcggaggattcaccagacggctattcgaacatagacatactgatcaacgccagcaagtgggagatcaaaagtccgacgggctccaatatccgcaccgtcgaatcgaacctacgcaaggcgaaaagacagttcggcaacgcctatcccaatccgctgacggaatgccgcgtcgtgttcaacggcaagtcggtcggaatcgatgatgacgagcttgaagccgaactgttgcgacgggcgatgcaacatggcatcgggcaggtgatccaagtgagaaaggacgggacgataaccagaatcaaataggacaatccaagtccctattagcagagccagagattgtcccattcgcctatatcatagcattttccccggtatgcgcaggacttgtattcctgggaacatggaaaatatcgggaaattgcttgccgatgggcatcgtagagggtctgtcaaaggtacaatagatggcgtcgtggtccgtgtcagttttcgaaagctggaaactcaaaaccacgcgtaacgtcaatcatgcctgtcattggagatgaatgaccgtgtttgtatccgacagccccgaatatgcgcggcatgtgcgacttgctgacatgatggtcgcgtttctgcgtgggcatggcaaggattacgatgccgattttgcccagcagatgctcgagggcgatggtcctgggctttcggtcgagatggccgtggacgccatcgtggattccaatcttgaaccgccacgggacatgattgtcctgttcggccaggtccatgacgaagacccgatgtgcgatgaggaatacgaacggttccgcgaatacctgcgtgaacgcgaggaggaacgcgtcaagcaaaggggctgattctcatcagctgattcaagccacccgcatgggtggcttttcttttgcctttcacaccccgtaaggggcgggcgtagccatgcgcatcgtaataagaatggccgtccactcgccgacatgcggtcgcgggggaccgtggccgagcagagcgcacgtaccggacaggcgcgtgcgaggagatcgagccgcgacgacttcgccgacgccatgaggaacacgctcctgtaacgcgtaacagccaacaccatctaacgaaaggatgagtcatgaccgatccgtccatgacccgaaagagcaacggactagacctcactccggaaacccaggcggagatctggcagtccgcgaaatacgattccgcgttcatgcggctcgtgccggagatcaaactgcccggcaacggcgtgcgtgtaccgatcatcaccggcgacccggaggccgcgtgggtcgatgagggtgccgagaaaccgaagagcggcgtcggattcggcaagaaggacatgctgccgtacaccatcgcggtgatcatgccgttctccaaccagttcaaacgtgactacggcgcgctgtatgaccaggtggtggccaaaggcccgcaggccatcgcccgcacgttcgacaagaccatcatgggattggtcgacgctcctggctccgacttcgacacgttgaaggacgcgacccagatcagcctaggcaagcactgattccaatcgctcgaaaacggcgtgattgcaacggtttcagacttcgggaccgttggaactgcgccgtttttgaatgcgcgcggaatggcggtttccgccacgtttcgggcggctgttgccaacgttagtgtgcttttagtgtgcccttagaagggtgcgacgattgccgtgacgattttcttcttgctcatgcgccgcctgattgtcggaagtgttcgtaggggcatgaatgcatggcgtgaggatggctgcgttgttgacgatcggtcatcacaatgttatattgttctatatcaactagaataatatgggaaagagggacggatgtgattatcaccgtggataaggccgatgcccttcctctatatgagcaactgcgtcggcagatcattgccggcctggcacgtggcgagcttgaaccgggcgatatgctgccttcggtgcgtcggctggcgaaagatcttggcatcaatctccatacggtgaacaaggcttatgccatgctgagagacgaaggccatatcgtgatgcgtcgagggtccggtgccatggttgcgccccgcgacgtcggttccctgtcgcagcagcatgatcgtgaaatgcgccgcatgtgcgacgatatctaccgcatcgccgtcgaatacaaggcccatggcggctcgttggacgaattcatggccgatgtgaagcataatgcttccgccgtttttcaggacgaaaccatcgaccggtccggggatcatgccgacaatcaagaagcggaggaggggctccaatgacaaattggatgatggtcgcaatagttgcgttggaaggcgtcagtgtagctctcgctccttgggtggtgcgtcgcacggtgtgcttcggggtgagcgtaccggtttcggcgcaacacgaccctgggatcagacgtgcgaaaatcggatataccgtttgtgccggatcggtaagcgcgatggtggtagccgcaagcgtcgcctgcctggtgttgtggggagccctcggcggaaccattgcggtgacgacaatgtcgttgctgttgatcgtggcctcattcgcgctgattgtgaagtatcgcaagcgcaccatgcgaatcaaacatgaacgtggctggaaggcatccacgctcgaacgcgccgcgttccttgccgaaaatgccggtctggagccgctggggctgcaatgggaattgctgcacctcgtgccggtcagcatcatgaccgcctccgcgttcatgctgtatgacagcatgcccgaccgtctgcccacacacatgaacgctgcaggtcagatcgatgattggctggataaatcgttgtgggtggtgcttggcatgcccctactgatacagctcatcatggttgcgacgatgaccgccgttcatgcaatgatcatccattcgccgcggcaaatcgacccggagcgtcctttcatttccggctatgcatatggacgcttctcccgcgcatggagcgtctacgtgttgattgtcggcttgacggcgaatctcggattcgtcggactgattcccatgtatgcgaactggtgggatattcgcgcatggggctcggtgatgatgctgatcgcattggcgatcattgttgcggagttggttcttgccgtagtcttcggtcagtgcggttctcggacatggcgattggatggcgagaacgacgacggaaacaacatggccgatgacgatgacgacgaatgggtgctgggcatgttctactattcgcctgaaaatccggccatcgtggtgcccaagcgcatgggggtcggatacactttcaacatggcgcatcccttggtctggctgatatgcgcggcgttggcgctgttgctcatcgtcggcctcgcattgcccattatctcaggttgaatcaacgatggatgtcctactggaatggcctgatatgtcataagccgacatgaacgaattcaaattcgccgtgtccgaaaggtgatgtgacgcgatggtgctttgtaccgtactcatactgtgctgagagcaatagggcccgattcgaacggttggtttcgaatcaggccttacaataagggtggcaaacggctatgaaacgaacgtgggacttcggggtgaatgcatgatgaatgaagcgaaagagaggcattcgggttcgcgttggcttgctgtcgtggccatcatcgcggtgctgggcgcggcgggtacggtcggagcgtacgcctatcacgccaaacagcgggaggtgttggcggaatgccgtcagtccgtggccgaattcagttccgcacgcaaggcgattctcgacacttccgacaacggcggcgaactgcagaagctcgtccgtagcgtgctcggagtcaacgacatccttgatgcgtttgctgatgcggccaccagtgcggaaggtaccgtcgataccgagggatgttccgccagtgcaaccatcacgcagctcaacctggtgtcaaaaacgctgaacagcgccacggagtcgttgaaggacagtcttgcgaagatccaatccaagaaccgatcctccatgtcgaacggttcgggtgacgcctccgacgatacgagttcaggcggcgattcctcagcgaactccggcgacagcggcaatgcaaccgatgataagaccctgggtaaagccaagacgcagctgcaggaatccatcgacaaggcccagaggttgctcaaacggttgtctgacgattccaatacgacattgacgggcaggaaacttctcaacgccctatcgaaggccgtggatgccggacagaaactcgtcgatgacggcggcgtcaaggattccaagtactacaaggcggccaaggtcaccctggacgaggccatcaccatggccgacaactgggttgacggccaagcttccaaggccgagtgacggtccgcgtgtcgcttttcagcaggggcatacagtggcacgtggaatatacgacggagagggagaaagcgtaggtcgccatgagcgaagtgagccacggcgtagaaaacgtgcaggttgcgcaaccacagcaggaaggcattgtcgtatccaagccggtcgcccgtgtgatgatgttggtcaatgccattgtgtggggtaccggctacaccatgcttaagcatgcgcaggataatatgccgacgcaatggctgatgttcttccgcatgggtgccgccacattgctcatggccatggtgttctttccacggttgcgcagaatccgtctgcgccgttacgtcatgcccggactggtgcttgccctgacctactggatgggttttctgttccagctcaaaggcttggaaaccacgtcacctgggcgcaacagcttcttcaccgacacgtattgcgtaatggtgccgttcatcgtctgggcatttactcggagacgtcccaactggcagcatctggtcgccgcgttcgtatgcgcgttcggcatcggtctcgtgtcgctcagcggcggtggcggggacgaactcatgcacatgagtttcggtgacaccatgaccatcatcggcgcgttcttcttcgccctgaacttggtgctggtcggattcatgggcaggggtttcgatgcgatcgcattgatgctgatggaattcgtctggtgcaccatgctgttcggcggcggtgccgtgctgttcgaaggtgctccgtccgtggcgtgggcgcgttgggatatcatactgtgcatcgggtatctggtggtcggctccacggtgatcgcccaggtgttccagacgatcgccatacagaatctgcccacttccgaagcttccgtgattctgagcaccgagtgcattttcgccatgctcgtttccgtgctctttgccggcgagcgtctcaccgttccgtcggtatgcggtttcgcgctgattttcggtgccattctgctctcggaagttcagttgccggctcgacggcgatagtttgtccgtggacaccggaagacttggaatctcgtgaaagagttttgcgagaagtggtggaagcgtatcgccaccaaagaaatggtcttcatcggtattgtgacgctgcttgcgtcgctcatcgcctcatggttgaagcagttcccgggattcagcctgttcggtgcgctgatcatcgcgctgttgattggcatgatcgtgcagtttccgattcgtcaatggtatgtaggccgatccgccgaacataaggccggtgtgaaggatgccgccggagtgatctccaacaagctgctacggttgggcatcattctgcttggcttcaagctcaacctgaccgtgctgttcacgcaaggtatcaaatgtctgccgatcgccgctgcagtggtggcgcttaccatcgtcgtatgctatggcatcgcccgcaggctgggcgtcgatccgcagctggcgattcttgtggcgggcggcaccggcatctgcggcgctgcggccgtcatgggtctgtccggctccatcaaggtgccgccggagcaggaggacgacaaggcgaacaatgaggtgatggccgtggccatcatcgccatcatgggcaccattttcgcattgctggaaatcgcactcggcccgttgaccggtcttaccaagacgcagctgggcatcaccgccggcgcatccctgcacgaaatcgcgcacgccgtcgccgcgggtgacgcattcggtgcggttgacatcgccaccatcatgaagctttctcgcgtgctcatgctggtgttcgtggccatcatcatcgccgtctggtgggacaggaaccattccgaaatgccggccgacggcaaacgtaaggtttcgttcccgtggttcatgcttggcttcatcggtgcctccgtcatcggcactttcgtgccgttcatcgccacgatcactccgcagctggtggatttcgcctatatcgtgctcggcatggccatggccgcgctcggcatcaacgtgaacttcaaggccatcgccaaaaagggacggaaagcgttcctcgccagtttcctcacttcgattctgctgatgtgctttgcggccggtgtggcgttcgttttcttctaatgcaacgatagagcggcagcagatataggaagcatgcgaatgacagactggcggtcggggctccgaccgaggcaagtggcacggcgccggcaatcgaccaggggatgagcggcgccaccactacggcggtgtcttccagattgattgcatgccgctgctcgtccggctcgacttcacggcatagctggtcggtgagcatgatcgacaacgtttgattgcatgccacacaactcgtcacgatggatgtgatgagcgtggcgcagaatcctccgacgcggttcgcaatgcgtcggatcatgcgatgtgcgccgcccagcaggcctgtttcttgaaaaatgccggaatatgatgacgaaatgcagacgatcaacatcaccttgatcatggagatgacgccgccgccgtcgatcagcggcgccacctgtgcattcggacaatggtagccgagcatcaacgcccggcctacggaaagccagtccatatgctgtacgaataggcatatcggcaaggccgtgcagatgctggcacccatcgtgagacgcacgtccacgcgtgcgaccgccagaacgatcagtaccacggccggcaacacggtcacccaatgcaggttgaacgcctcggcgaacaggccggccacgtccatcgagccgacggaaggatgcgtacacaacgccagcgccgcgtagacgacgcaggtcagcgcgaacggcaccgcggctgtacgcagcatgagccgaatattgtcgaaaatgttcgtatgcgtcagtgtcttgaccagttgcgcactggtggagacaggagagcaacgatcgccgaaatatacgccggaaagaattgcaccgcctaagaacagcggcgagacctgcatggatgttccgagcgtcatggtgatcacgcccatggtcgcggccgaggcgaatgatgagccggtcaaaagcgacatcaggcaattgagcaggaatgccagcaggatcaccacatgcgggcgtatcagggtcgtcgtgttcgccacgatgaacggcacggtaccggccgcgcgccataacgtggtcaacagtcctattagcacgaacgtgaccaccacgatgctcgccgccttcatggtggtgaagcccttgcgaagcatgggcttccaagcgtgcccggtcagacgtccatgaatgagaaagacgagtacgccgacagccaatgccgggactatggaaataccggctgcgatacatgcgacaagcgccgtgcaaaacagcgccatggtgacgatctcggccatgaatctccttttcccggcctatggctggcgttgcgccggaatcgggtgtctgaagcccatccggcgcattggtttgaacgaaacctttgcaagattaacaggcttattacgaaataatatgattcgggtcacaggtaaaatactgtgtatgaacttcctgagtatggactacttcatcatggtcgccaaggaacgcagctttaccaaggccgcgaaacgacttggcatcacgcaacagacgctgagcgcgcatatcgcgagcctcgaacgggaggtcggttgcgacctcttcgtccgccacgttccgctggaactgacctatgcgggggagacgtttctgagatatgccactgatttccagcatgatcacacgatgatgatgcaggagttcgacgatatcgtacacgatgaaaccggtatcctgcgtgttgccgtcgcacataccagggagcgcaccatcatgccgcgcatcatcgccgcctaccagcgcaaaaggcccggcatcatggtcgacatgattgagggagccaatgagcaacatgcaagacgtttggtcgacggtgaggtcgacatcgccatagcacatttcgatcgtgcgccggtcggtgtggaattggtcgacttctacaacgaagaaatggtattgatcgtttccaaccggctgtggatgagtgccgtcgccggcggctccgacgaggcggaacgacgcattgcgcaaggggattgcctgccactgaaggattgtccgttcatactcggtcaacctgacgatatcgatggccatatcgcagccgagttgttccggcgtgcagggttcagacctcaggtcaaggcccgttccggcaatctgcagaccgcgctcgcattgacgcagctcggtgtgggcgcaagcctgacgatccgccagttccttgatgagatgcttgatgacgaagcgcgcaggtctttgcgtgtgctgccgatcggcgaggatgcgcgctatgccatcagcttcggtgtgcgcaggcaaagctatcaatggagcgccatcactgacttcatacaagtggcccgtgagatattggcatcttgagattgttcgcccgccgagcttgcccgagacgacacaggacgtgatttgcttcaagttgacttgaggttgctaggctgagagcgacaatatgaagaatcgaggacgattatgaccgaaatcgacatcacccgactggaacgactggaacaccgcaccgacgaccctcaggcccctgaggtcttcttcacgccaatcattgcgccggacagcctgatcgccgtctaccatgcgttgggcgcaacgccggaaggcaaggtggccatcaagatccattcgggtgaatccgagaaatccaacaatctcaatccgtcgcttgtcaaggatctcgtacaggagatcggtggcacgctggtggaatgcgccaccgcatacgacggcaaccgcgaaaccccggaaaaaagcctcaatgtgttcaaggagcgtggctacggcgacatcgccccgatccagatcatggatatgggcggtgaaatcgagattccggtcgcgaaatacaagcatatcccgtacgacatcgtcggtatgcacgttgacgattacgattccttcttcgtgctttcgcatttcaaagggcacccgatgggcggtttcggcggcgcgctgaagaatgtgtccatcggcatcgcctcttcgaatggcaaacgctggatacactccgccggcaaggtcaaggaccgctggatcgacacgccgcaggatgattttctcgagtccatggccgaagccgacgaggccgtgatcagccatatgcacggcaatatgatgtacctgaacgtaatgaaccgtctgtccgtggattgcgattgtttcgcaacgccgtccgagccggatatgcatgatattggcgtgctgtcttcactcgacccggtggcgcttgatcaggcgtgcgtcgatctgattcacgtggctccggatggcgcttcggtgaccgaacgcatcgccacgcggcatggcgagcacacgcttgagtatgccgaggagctgggcatcggctcgcgcgcctaccgtctgaccgtactcgagtagcccgttcgaatgatgcgatcgcggtgcctgtagtgccgcgaaccgtatgaagggaggctcatcgatggaatccgtcgaaagcatgaaatccgcgattgatcgtgtggaacggttgctggccgaaggccggtgcgcgttcgtcgccattgacggtccatgcgcatccggcaaaaccgtgttcgccgctagcctgcatgagcgtttcggcggcaatgtgctgcacatggacgacttcttcctgcgacccgaacaacgtacgcctgaacgtttcgcagagcctggcggcaatgtcgaccgtgagcggttcgaagccgaagtgctgaagccattggcggcgggaaaggcggtacggtaccggccgtgggattgccataccggcgattttgcgacgtcacgcagtgtcgaaccggccgcactgaccgtcgttgagggaagctacagcatgcatcccgcattgcgcggctactacgatctgacgatgtgtctcatcgtcgacccgagtgaacggcttcgccgtctcgaggcgcgtaatcctcgcatgctacaacgattcatcgatgagtggatcccactcgaaaatcgttatttcgaatccaccaatacccaaggaagtgccgatcttctcgtcgacaccgccctctagaaccatccttccaatcctccctccggcgagggagagcgccctacggggcaaaaggagagcaaaggagaaccaatgtccacttcatccacatccatcgcattgcgtcgcgccgatttgccgcgtctgagcctgaccgtcaaggccgctgccaccgtgctcgccatcgtggctgcggtcgccctgccgcagctgttccacgtcatcggtgccgtttccggtcaggggaccatgcttggcgtcgcgttcctgccgatgcatctgcccatcatcttcgtcggtctgatcgccggcccggccgtcggagccatcgccggtgcggcggctccgctggtcagcttcctgctgtccggcatgccgatgctggccatgctgccgctgatgatgatcgaattgtgtgcatacggtctgattgcgggcctgctgcgttccgtgaagttgccgagtctggtgaaggtcgtacttgcccagttggccggacgagtggtactgacggtcgccaccgcaatcgccgtgttcgtcttcggatcaagcgattccatcgccgccacgtggaccagcgaccttgccgcgggtctgccgggtctggccctgcagtgggcgcttattccgcttgcggcctactggagcgagtctcttatcaggcgttagccgcaatcctttctccgcattcatcttgctccctttggcaaagggcgctcccgggtgaggtggagggaggattgcgccacgttctgaacaacgtatgacctttacgagccaagtcactagacttggctctcgtcatccatgaggccgcacatctagcgaaatatagggagtgccatgattgccggagtgtccgtcaccacgttgttgcttgttctggtcgccggcatcggagccggattcgtcggctacgcggtcggcgcgtcctcgctgatctcctacccggcactgcttgcgttcggcattccgcccgtgctatcgaacacgaccaacaccgtcggcgtggtcggcaccggcatcggcggtctgctggcggcgcgcaaggagctcaacggacagcgtacccgtgtgatcgtctatgcgctgatcggtctggtcggcggcattattggcggcctgttgctgctggagctgcccgccgaggtctttgaattcgcggtacctccactgattctgttcagctcgatgatcatcgcattgaacccacgcaagaaggcggccgcgcgagacgccgtagcgcaagcgttgcccgaatcacagcaaggcgaacgtgccgcgctgatcgcaggcaaggcgagtggcggcaagctgcatgatccgtggtggctatggctgggcgtgagtttcgttggcgtctattccggctatttcggcgcggccgccggcacgctggccctagccgtacttgatttgggcaagatcggcccgttccatcagatcaatgcgttgaagaccgtggtgggtttcggtgcgaacatctccgccgccatcatgttcatcgtgcgtggctcggtctattggccgttcgccatcatgatgtgcctcggctgcatcatcggcagcgccatcgcgccaccggtcacccgccatattccggagaacatcatgcgcgccgccgctgtcctgaccggcgtcatcctggctgtcaagctcggctggagcacctacatttagactcgatgcctcatcgggacaaaaaggccttgtccatggattgccgccgatttacatgaacgcaaacttcgccaaaaggctcaggtattgaatgacaatgccgccgaattgggaatggctgcgaacatgcttgccgcgaacatgctgaaaacctttatgcttgaaggtggattcgatttggatgattggaagcggcatggcggttgttgacgaggcgaaactgcggtatctggacttcctctcgcgcgaggacagggtacgtcatcaccggtatgtggaagagatgaaacagtacgacctgatgcgttcgggtgacatcagcgccatctccgaaagcaccagactgtgggactcgggactgtacggctacctgtcggatgatccgctcaagaatgcgaaataccggttcgtcaccaccatcacgctcgccacacggttcgccatcgaaggcggtatggatgaggaggatgcctacaacgcctccgacctgtacatccaagatcttgacaactgcaagacccccgacgatgtgcgccggttgcacaccgacatgatgacgttcttcacatgggcgatggcggatatgcagaaagccgagacgcattccaaggcggtgaacgaatgcatggactacatccactaccacctgcatgagaagatcaccgtgtccatcctcgccgaacatgtgcatctgaaccctacatacctatcggaactgttcgtgcgggagacgggaacgtcgctgtcgcagtacatcaccgacaagcgcatggaagcggccgagaacatgctcaagtattcggaatacagcttcaatgagatcgcgcagattctcgcatatcggtcgcaaagccacttcacgaaggtattcaagaagcacagcgggatgacaccgggagaataccgcaacaagtatgcgcagaacggcatttggccggaatagtgaacgtccggtggccgcagggcgaaatttcttcgcgaatggccaacaatgcggaggattcttcccgtaatccgctacggtagagatggttcaatgacgacggatgaaggtaagtaaaggaataatcgaatatgggaatgcctcttgatctgtacgtgattcgccacggtgaatccgaggcaaacgtcatcatcagcgccggtgagcagggcgacgattcgctgttcactcaggataacgtgaccgtgccggaccgctcgtggagactcaccgcgatcggccgcaaacaggccgactgcatcggccgatggttggtggcgcagcagcagctgttcgaccgttatctggtctctccgtatgtgcgtacccgtgagaccgcggcgaccatggcgctgccgaaggcgaaatgggaagagacgcgcgtgctgcgcgaacgttcatggggtgagatcaacaccatcaccaaagacgatttcaagagcaactacgcacgcaattggatgttcaagaacaccgatccgctgtactggaggccgccggcgggcgaatccatcgccgatgtggccgagaaccgtgtgcataatctgctcacgtccctgaatcgcaagtcggatgctgaatccgtggtgatggtcagccatggcgatctgatgctggcgttgatgcttacgttggaagacctgtccgacgaggagttcatgcatcgtgcggcatccgacgaatggaggatcacgaactgcacctgcttccattattcccgtcgtgatccggcgaccggacgcacctacaagcgcttccgttgggagcagaccgcgcggccggtgttcgatgaggtcggaggccgttgggtggtgaaggtcgacgaatggcgtgagttcaggcgtccggtattgtccaacggcgatttggtggatgtggtgcatgccgttgaccgccacctgtgacaccgtttgatgccgaagcgttcatttgctgaaacgtgccgtgcgttcggagccattacaatggcgtgtgacgtgcggcacgttttccgttattccgccgcgcgagagagttaaggagacatagtatgtccaacttgttcacgtggaagatccacggtgacggcaagacgctgcgcccaggcgaagtggtcgagcccgatgagcgcctgacctggcctcgtaccgcggaaatcggtgcacagcacgtgatcgccatgttcggagccaccttcctggtgccgattctgaccggtttcgatccgtcgaccacgctgttcttcacggcgatgtcaaccgcgctgttcctgctgatcaacaagaacgtactgccaagctatctgggctcgtccttcggcttcatcgctccgatcaccgcggtgaccaccgcgaacaagggcatcgccgtcgcatccttcggcatcatgatcaccggtctgttgctggccctggtcggtgtgctcgtgcacttcgccggcgccaggtggatcgatatcatcatgccgccggtcgtcaacggtgccatcgtggccatcatcggtttcaatctggctccgagcgtgtggagcaacttccagaaggctcccgacaccgcggtggtgaccctgctcgccgtgttgctggtcgccgtgctgttcaagggcttgcttgggcgactcaacattctgatcggcgtgatcatcggctacatatacgcctgcatccgcggtcaggtcgacttctccgccatcggcgaggcctcgtgggtcggcctgccgaacttccacctgccgcaggtcgacttctccatcctgccgatgttcgtgcctgtggtgctcgtgctcgtcgccgagaacgtcggccatgtgaagtccgtctcgcagatgaccggccgtgactatgacgaccagatcggcaccgccctgttcgccgacggtctgggcaccaccatcgccggcttcggcggaggctccggcaccaccacctatggcgagaacatcggtgtgatggccgccaccaaggtgtactccaccgcggcctactggtgcgccgccgctttcgcgctcattctgagcctgtgtccgaagttcggagccgtcatcaacaccattcccgcaggcgtactcggcggcgtgaccaccctgctgtacggcatgatcggcatgatcggcatccgcatctgggtcgagaacaaggtcaacttcgacaagccgatcaacatcatggtcgccgccatcacgatgatcatcgccatcggccagttcgcgttcgcggtcaacggcatttcgttcaacggcatcgccatcggcacgatcgtgattctcgtcgcctaccatggcctcaaggccataggcaaggccaccggcaccatcgccaaggatgatccggatatcctctagaagatgaatggtcgacgctcccctcaggcgaggggagcgtcgacgcatatatacgtatgtatgtcaatcgttttgacctcaagtgcggttgaagacctatgatgatgagcgtcgggcaacgcagacaacaccagtaggggagtcatcatgagtaccacagcaggtaagaaaatcgccatcgtcaccggttccgcactgggcctcggctatgagctggcccgtcagctgattgacagtggctggttcgtggccggtatcgacttcaacgcgcaacgtcaggcggagttgtctcaatccttcggcaaagacgaataccgtgccttcgtgggtgacgtttccgacgaatccttcgtgaagaattccatcgcggccatcaggcaaatcggccatatcgacctgctgatcaacaatgccgggcagccatcgttcaaagtaccgaccgcatatgagggtgccgacgtcgacaagtgtctcaaagggcttaagggcatgatcctgtggagcgtcgaaacattgaaggccgacgatgagcacgatctcaaaatcgccaacgtcatgagcaccgccgcgacccgtggcaacgccaacgaatccgtgtattgcgctaccaagtggggcgagaaaggctacacgaacagtctcaaggcggcctataagggttccagcgtgaaaatagtcggcgtgtatccgggcggcatcgacaccgacttctaccgtgacagccatgactatgtgtccgaagacaagcagcacacctttatgagcccggccgaattggcggagatcatcctgttcaatctggtcaatgacgccaatctgaccgtttccgacattctcatcgaacgtaactaccgctgaaagtatcgggcatgggctattgttaacaggtttgcgcaacgtgcgcaaaagtttgacatgaaaggccactgtgcccgataccgtttttgaagaagatgccctcgcggacaatgtgtccgaatatagcgaggaagaggagcgtccgctgaccttcgccgagttgggcgttcctggcccgctcgtacgcgtgcttgcggcggatgacaagaagaccgcgttcccgatccaggcggatactctgccggattccctggccggtcgcgatgtgcttggccgtggccgtaccggctccggcaagaccctggcgttctccattccgatggtcgcccgccttggggaggtggatgccgacgaatacgagaacatgagccagttccgtcatgaggtcaaacgcgtgcagcaaggccatgccgaggaacgtcgttccgaggatttcgtgccgagaccacgcggcttggtactcgcccccacccgcgagctcgccaatcagatcaatgacgtgctgacgccgttggcgcagatctatggcatgagcactaccacgatttacggtggcgtgcggtatgcccgccagattcgcgacctgcaggccggcgccgatatcgtggtagcctgcccgggtcgactcgaagacctgatccagcagcatgccctgaccttggagaacgtgcaggtcgccgtaatcgatgaggcggatgagatggccgacatgggcttcctgcccccggtcaaacgactgctcgcccaagtgtcgttcgatgcgcagatcatgctgttctccgccacgctcgaccatggtgtggatgaggtcgtgaacacgttcctgtccgatccgaaggtgcatagcgtcgattccgccaccgcggccgtcgatgagatgacccaccatgtgttcgagaccacgcaggccgaacgtgccgagctggtacgtacgctcgcttccggctcgggccgtcgcatcctgttcacccgtaccaaattccagacgcagaaactggccaaggacctgacgaagcggggcattccctcagccgaactgcatggcaacctgagccagaaccagcgtgaccgcaatcttgccgccttcgaatccggcgatgtgaacgtgatggtcgccaccgacgtggccgcacgaggcattgacgtgagtggcgtggaactcgtggtacaggtcgaaccgccggaggattcgaagtccttcctgcaccgttccggtcgtaccgcacgagccggcaaatccggcgacgtggtcaccatcgtattgccgaaccagcgccgtaggacccgtcgcctgctacatgaggcggggcttaagatcaagccgatcgaagtgacgcatgattccccggaagtgcttgagctcgtaggggaagtggccgaaccggtattcggctggacgctcgaacggtcccagccgacgggcaatcctcgccgcaagaggagcggcagggataatgccgagcgcggtgatcgtttcgggcgttcgaaccgttccggcgggcgcaacaaggatcgcggtaaagacaagggcggcaaacccttcaaatccgagcgcggcgatcgcaatgaacgttccgagaggcactccgatacctacgaggagcgtttcaagccggcgcggaaccgcgccgaacgtcgtgccgaaaagttcagagggcgagacaaccgagaggccatcgcccgtgaggaacgttgggaaaatcctgaagtccaggaaacccgtcgcgacgaacatgaaaggaagcgtaacgacaagcgtcgcgaaaagtacgcccgtctccatgagcagcagcgcaccgaggcggacgaaccgcaggaattcggccgtcgcgggtctttcggcaaaaaggccaagcagtcccgtaagcagtttgataagcggcagggcgctccttccaagaagcagcgcaaagccgacgcgcgagagcagcgccgtttcgcagacgaccgtcaaggcggccgctacgggcgtgccgatcgcgatggataccatgaggggcaacaaggtggcggaaagcgcatccaccgcaaggagattcgcgtgattcaggacgagcgttccggagacgcgaaacgccatgatcgtcgtatggaggccaaacgcggtgaacgtcacgacaagcatgccggcaagccgttccgcaagcatgcgaagattcgcaaggcgccgttccgtgcgcgctgagcatcagtgatcaggtgactgtcgagtggtcgttcatcgtcccccttacgggggatgatgaacgaccacttcgtatatcgggcgactcctttccgaatgatcgccggatcgcaatggcccttcagccggcaatcggctgatactggtcctcggcggtgaagcagcgcctatacaccataagcatgatgatgctgtcggccagcagggtgagcgcggcgatggcggcgagaattatgaactggtatttcgccgcgtcgatcggattgcctccggcgatgatctgtccggccatcatgccaggcaccgttacgatgccgctggacgccagcgaagcagtggtcggcagcagtcccaagcgaatcgaagagacgattgacggacgtgccgcctcccaagccgtggccccaagcgcaagcaatgtgtccacctcgtctcggcgctccctcatgctttcgaaaaagcggctcagccctacggccagggcggaaacggtattgcccaacagcatgccggtcagcggtactacgagttgtggcgcataccatggccgagggcgaatgatcagttcggtgaccaacgaaatcatgatgagcatggtgatcaccaaactcaggaataccgggcatgccaagcctttcggcacgcctttggcacgtgacagcgtgatctgcacggcggcgatcagcatgaacgatacgagcagcaagaccagccatggattgttcgaggcgatgacgaactccatgatgaagcccatcgcgcatagttgcaacagtgcacggcaggccgaccacagcaacgttctgccgacgcccatgcgcatgatttcggagatgcctgcggcgatggccaccatgatcaaagccgtgaccaagccccagatatcgatggaatagtaaccgccgttcatgcgattccacctccattggaaatttcgactcgcgattcgttctcgatctgcgtcagtatgccgtcggcaagccgcatgatgcgcgtcgcacgaccatcgggcggacgatgccggatacggatgacggccatgccgttcaatgcggctcgttccagaatcgccgccaccttgtcggcattctcatcatcaagaccggcgtccacctcgtcggcaagcagtactttggggtcggtcagcaacgtacgcgcaagactcacgcgggccgcctgacctcctgacagatcatgcggtgcgcggccaagatcaatgtcggcgcagccgatggcatccaacgtttcacggatgctcgcatccggcagcagctcaaccggcttggccttacgaccattggcctgcgtagcggactgccggatcgccagcgtatacggcagacgaatcgcatcggccacgcaatctcccaacaacaccggcttctgcggcagatatgcgatccgtgcacgccattgctgcggcgtaaaagccgaagcgggatgtccttgcagcacaaagtcgccgtgcgcccgcggattgagtctggcaaacgccgtcagcagactgcttttgcccgaaccggacgggccgaccagatccactatctcacctggtgcgatcgccaacgagacatccttgaaaatcgtgcgtcgcttgccgtctaccacaatctcacaggacacattcgatgccgaaaacatatgttgcataagggaaccataccgcgattgccaagtcggtgagccatgcacagcgtttcctgccatccgtcagggtatggagacatgcatggcatgaaatccgcaggtccatccgtcatccgagggttcgctgagcgtggaatcgatttcggacgaaacccccatggatcggccgccgtcccgtggaccgacgatgatgcgtccgattggcgtatgcgttgcaatcattggttttccaaagaaagctcttcatgatggtgggggtaatgagtgatcaggattttcccccggtcatcggtgaaaatcaatcttacggatgactcgcgccccacgaatatgtactacaactacaccatggaagcaatatgacggaaagccgtgagacgacggtttgggcgatggtgtagtgagaggaattgcgaatgcggcagtggctgatgaacgtgagtttgttgcagggatggctgccggcgacgttgtttgcgattacggcagcgctgatggtgattctgctgatcggcgccattgcgaccatacgtaaggcgggcctcaagccggtactgatgccgctggtggttgcagcggttgccggtgccgtggggttcgtgatcacctggctgctttcggatgtgttcatggtattcggcgtggaacttggcccgcacgtgttcgtgtggacgagcgccggttgcgcgaccgtgggattcgccgtcacgcatatggttatgcggaggcgtgcaagtcgtgcattggccgtgatcctcgtgatattcgcgttgcttgcctccgctctcggcatcgatcaggcatatggcgaatatgccacgttaggttcgttgttcggtgtggactcctatcatgaagccgatctgaccggcatggccgaccgcagggacctcatcaccatcgcgcagtggaggcaaggcgtcgctgaccataccatccgcaacgtaccatcccatggtgcggtcgacaaagtggatattccggcaaccacatccggtttcaaggcacgcaaggcgcttgtttacctgcctcctgcggcattggtcccaaccaaagccaagccggccctgccggtcatcctgatgctgagcgggcagcccggatgcccgaatcgtgtattcaacgcaggtggcattcagaccatgatggacgactatgcccagcatcatcagggtcttgcgcccatcgtcatcgccgccgaccagcttggtgcggattcgcataacaccctgtgcgtggattcgcaggtatacggcaacgcgttgacctatctgacgcaggacgtggtcgattgggtgaaagacaatctgcccgctgcgcaggatgccaaggattgggccatcgcaggattctcccaaggagccacctgctccatgcagatcggacccaactatccgaatctgttcggcaccatcatccccaccggcagcgaaatcggaccgagcaacggcagcgagcaggagatgatcgaccgtttcttcgatggcgaccgcgaagcgtatgagcgccagatcccgatcaacgccattcgcaatcatgctccctccgatcagacgctcatcatgggcacgggggagaaggacgtcgaatcgttgcgcaacatcgaagagatagcgcccgtggcccgtaaggcgggcatgcacgtcaccgccgtggaatcgcttggcaacgcgcatgactggcatgcggtgcaggacacgttgcggtacgggcttgccgtattcgggtatgacaccggcatgagcagcgtgaaaccgaagctttccgactatacgaatcttcgccgtatcaagatttcctgaagaaccgactcgaaaacgaatggacaccatgactgaaacgcaagcaaagcaacagaagatgaagccgctgttcggcttccgggccctgctggccgacatcgcggattggatacgccaccatctgctgaccgtctgcttcgcattgttcattctgctggtcaatgtgatcagccggatcgtctgcgccgttgcgcactggcagtttcctccgcacctggccaaggtgagtttcgaagcgttggcgcacggcagatggtatacggtacccatctccatgctgtacatgtcgcatctggggcgtctggtcatcgatattccgctgattctcatcgcattcggcctgtccgaatcggtgatcggcaagatcaagaccatgtgggtgtccgtcatcactacgctgggtggcatcgcactcggcatggggctgtgctccctgctctccagccatagtccgcagtggcatgcgatttcccgtgacggtgcgattctcgggccgctgatcgtggtggccggtacgctcatgtgcgccagtgcgttcacttccgtgctgtggcgccgccgcattcgtgtaatcggctacgccatcgtgctcatcatgttcctctaccgtggtgaagccagtgactactgtctgctttccgcgacgttgctcggtcatgtgcttggctatctcatggcctccgacgggcgaggcgactcctatcgcaacggtgcgatctacgagatgcgccgattggtcggcgtcgtcgccggcgtgcaggccatcggctcgctggtggccgtatcgtcacgccaatccttcggactgctgtcgatgttcggcctgctgaccggatcgaccgagttcgacaccggcagggtgctctactgcctggatggcacctcgcgtgtgaactgcttcgcacagtaccgtatgttgcgcttctccatgccgggcaattggctggtttccatcatgccgacgctgatgctgttgctcatcgcctgggggctatattgtggccgtcgcttggcggcggtactgagcgtcgtcttcaatgcgtgcacgatcgtgttggcgttcctgttctatctggtcattccgatgtcgtatgcgaccgatgaccataccatgaccgcgctggtccgacatggcgcgttgcatgcgatgttttccacaatggcgttgccgctgattttcgcgatcgtcgtgattgcattccgccaatgctttacgatccgtaccaagagcgaaacgattctgcgcgatgtcgcgatcgtgctttccgctttcatcctgctgggactgctttacgtcggctacgggctgagcgttcccaccgacttcaacgaaacgccgcagttgctcgaattgattgccgattatgtgcagcgtctgctgccgatcggtctgctcagcggggtggaaccggccttcattccggtcggttggctgtcccaggccatctatcaatgcgtcggcccggtattctggatcgtggcactgtattgtgcgtgggattgtctgcgtgaccgttccatggtcaacgatgcatcccggcaccgtgtggacgaaatcattccgcttggaggcgaatccatgtcgttcatggctacttggagcggcaatgactactggttctccgcgaccgggcgctcggccatcgcctatcgcgtctcctacggcatcgcgttgaccgtgaccggtccattcggcgatccaagcgaataccgcgacgacttgcacgctttcgcacgattctgcgcccagcattcctggacgcccgtgttctacagcatccatgcggcccagcgtgacgagctgttgtcggccggatgggactcgcttgatgtcggtaccgaaatgatcgtcgatccgaacgcatggcagacacgtggcaagaaatggcaggatgtacgcaccgccatcaacaaggccaaaagggacggcatcaccgatgtgctcaccaccttccgcgaggcaccgttctccgtgcagacgcagatccgtgagatatccgcgcagtgggcaggcgaaaaggcgttgccggagatgggattcaccttgggtggccttgacgaactggtcgactcccgtgtgcagctgctctatgcggtcgacgaaagcggcaaggtactcggtgtgaccagctggttgccgacctaccgcgacggcaaggtgatcggctggacgcttgacttcatgcggcaccgcaccgacagcgtcaacggcatcatggaattcctcatcgcacgcatggccgaacgtctgcgcgacgaaggcgacgtggaattcatgagcctatccgcggccccactggccggtatgggcgacgatccggacagggccgaggaaagcgccgtgctacgtcatgccctgcagatggtcgccgacatcatggaacccgcgtacggcttccactcgctgttccgattcaagctcaagttccaccccgaagaagccaaggtgtacatctgctatccggacgcagccaagctgccgcagatctcgctggccgtggcgcaggcctacgttccttcgctcacaccggccgaggcgatgcgcttcgtcaagaccatcatgccccacgactgattcgttgtgccgggttgttccgaacgcgaatcccaaggttcccgcgattcgaatgcgttatagtgagtgcgcaaacaccaagtaacgcaattgccagaaatggaaccgaggtcatcgtgaagaagctgatgctggtttcggcattcaatccggtcagtcgactgctgcctcgcgtggagccggaactcaaggcgaaaacggtggcgttcatccctaccgccagcaaggggagcctgtactcgccgatcatgggtcttgccaaacatgccctacggcgtatggatgtgagcatatacagccttgacatagccagtgcctcatacgggctcatccatgatgtgatcgaagccagcgacatcatctacgtgggtggaggcaattcctttctcctgctacaggaaatgcgccgttctggggccgatacgatcatcaccgaggccgtgacgaacggcaaaccgtatatcggcgaatccgcgggagcggtggtggcaggtcccgatatcgggtacatccgcgatatggacgatgcgaaggcagcgcctttgctgcatgattcacggggtcttggactggtggatttccgagtggttccgcattgccacggaccgttcctcggccgcaaggccgccaaaatcgcccgtcgatacgccgatgcgtccgacctgcgcaccatcgccaaccgtcaggccgtcgtggtgcatggcagcaaggacatcaccgtcagcaggtgatcaggcgcgataacctccatgagatgacggatggtcgctggggttgcttgggtctagactgaaagacggctcataaagtactacttattttttgacggaggaccagcatgtcagctgaagcaaacgtcggtgtggttggccttgccgcaatgggcggcagtctcgcacgcaatctcgcacaccacggcaacaaggtcgccgtgttcaaccgctcctacggccgtaccgaaaagctcatgaacgagcacggtaccgaaggcgagttctatccggcgaaaaccctcgaggagttcgtcgacagccttgtcaagccacgcaccgccatcatcatggtcaaggcaggcgagccgaccgacgccatgatcaacgcgctcgccgatcttatggaaccgggtgacatcatcgtcgacgcaggcaacgcgtacttcccggataccattcgccgtgagaaggagatcagcgcccgtggcctgcacttcgtcggctgtggtgtttccggcggtgaggaaggcgccctgctcggcccctccatgatgccgggcggctccgaagaatcctggaagacgctcaagccgatcttcgagtccatcgcggccaaggccgaaggtgagccgtgcgtgacccacattggtctgaacggtgccggccacttcgtcaagatggtgcacaatggcatcgaatactccgacatgcagctcatcgccgaaagctacgacctcatgcgtcgcggcctcggcatgacccctgccgaaatcggcgacgtgttcgaagagtggaacaagaccgaactggactcctacctgatcgaaatcaccgccgaggtgctgcaccaggtcgacaagaagaccggcaagccgttggtcgatctgatcgtggatcacgccggcatgaagggcaccggcacctggaccgtgcagaccgcactgtctttggccgtgccggtcaccggtatcgccgaggccgtgttcgcacgaggtctgtcctccgaagccgacctgcgcgaagaggcccagaagcagggcttcgccggtccgaacggtgagctggacctgaatgacgaggagaagaaggccttcatcgaagatatccgccaggccctctacgcatccaagatcgttgcctacgcgcagggtttcaacgagatcaccaccgccgccaaggaatacgattgggatatcgatctggccgctgtggcgcgcatctggcgtggtggctgcatcatccgtgcgaagttcctcaaccgcatctccgaagcgttcgaatccggtgaggccaatgtgtcgctgttgttcgcaccgtacttcaagaacgccatcgaagccgccgaatgctcctggcgcaacgtggtggccgaagccgcacgcaacggcctgccgaccccggcattcgcatcgtcgctctcgtacttcgacggcctgcgttccaagcgtctgcctgccgctctgatccagggccagcgtgattacttcggtgctcacacctaccagcgtgtggaccagccgggtgcattccacaccctgtgggccaccgaggaacgcaacgagatcgaagcctgatttcgactggtatgaaagaagtcccgcagatcacggtggtctgcgggacttctttcataccaagccatcaatccctgttcggagcttcctttgtggctctttacagcttggaagcggcatcttcatcgatgagccaaagcagctcctcaccatcggcgtaggagctcggcgcatgcggattgttgcgccgagcgaaggcggcccgtaccgcatcggctttgcgctcctcggaagtgaacacccacgtatgcttcgaatgggcgatcatcggcacagtcagtgtcacgcgcagtggcggcggtttcggcgaatcacgcacgccgaccaccagcacatgcgggtcattgatttcggcttcaccatgatcggggaacagggacgcgaaatgcgcgtccggcccaacgccgaacatcgcgatatcgagcgacggcttgtcgccaagctgttcgatgagctctcgctgatattccgctgctgcggctgccagcacggcgtcggtctgttccggagtggcggtggtgatttcatcgtcgctgcgtccatcggccggcatctcatgaatgttctcggccggcatacggccgtcttcgatgagcttgccgaaccaggcctcgcgagcctgcttggcattgcgatcatcgctgtcggcggccacaaagcgttcgtcgccccaccacacgtgcacgcgggaccagtccacggcctcggccaaagggctttcgcccatgactttcagcacatagatgccgtcggtgccgccggtcacggcaatatcgacgcgctgacgattcggctcggccagcagatcggcgatggtcagcaacgtacgtgccgccacggcctgtgccagcacttcgggattcgggtatacgacagtcttgcgttccgtcattgaaggattccttgttttttgggtttcgattcagtgcgtcggattgatgaggtcccagccctgtgtcacgacttcggcatagatctcgtcggggtagagacggccgagctcctcgctcagacattcttcaatcgtgcgtgcaggtacgctgatggtctggggagactgtccgggcacgctctgcacggctacgccgtcatcggtggaagggcgttccaaactcagcacgccgtcggcgcgggtcagatacacgcctgtcacggcctttgcgcccggaacgtcctcgacgaccaccggcacgttcagacgcaaccgtagccaagcggccagcaaatccattggtaggaaatccttcgggccggtcactcgcacgctgcttaccggcagatgcggcggctgatcgagcatggaggcaagcatggcgcgccacacggtcagacgcgtccacgacatatccacgttcttcgacgaccagttgcggcgcagatcatccatcgtgcgcatcggattcgatgagttcatcgcatcggtaatgcggctgcgggccatcgaacccagcagatccttcgacaggttcgccggagcttcgtttggccaccaggccacgaccggcgcatccggcaccaacaacggaatcaccaacgtatccggatgatgcaccaggccaccgcgtggccgcaatacgatgatctcacctgcgccggcatcggagccgaatcgcacttcggcgtcgaggaaggtgtgatgccctccatcggcatgctcttcggtttccaccttgcgtgagctcggtgcgatggcgattacgcggcatggatgttcgcggctggcgctgttcgccacttcgagatcatgctccagcgacgcctcgttcgtggagatcagcagcgtgagcactcgacccaaggcggcttcgccgcgctcctcgtgcagttcatcgattttcgccgaaatctcacgggtctcggtgtcttgcatgatgatgatcatggcatcctccaacggtgtccgtcgcgggcaagcatctcaacggcctcttccgggccccacgtgccggagcgatatggttgcggctggccgagtgtggaccagaattcctcgatcggatcgaggatttgccagctcagttccacctcgcgtgtggtcggaaacagcggcggatcgcccagcagcacgtcgagaatcagacgttcataagcttccggtgaggattcggtgaacgagcggccataaccgaagtccatcgacacatcgcgtacctccatggaggtgccgccaggaaccttcgagccgaaacgcatggtcacgccctcgtcgggctgcacgcggatcacaatcgcgttcttgccgagctccttggtggccgtcgattcgaacggcagatgcggggcacgtttgaacaccacggcgatttccgtaacgcgcttgcccagtcgtttgccggtacgcagatagaacggcacgccggcccaacggcgagtatcgacgtccaatcggatcgccgcatacgtttcggtggtggacgccggatcgatgcccttttcgtccagatagccgaccacttcgtgcgatccctgccatccagccgcatattggccgcgagccgtatgcgcggccagatccttcggcaggcgcacagcggaaagcaccttcgtcttttcggccgtcaggtcggcggcggagaaggagaccggctcctccatggcggtcaacgccataagctgcagcaagtggttctggatgatgtcacgtgctgcgccgatgccatcgtaatagccggcgcgaccggccacgccgatgtcttcggcatgcgtaatctgcacgtgatcgacgtagttgttgttccagatcggctcgtacatggcgtttgcgaagcgcagcgccaacatgttctgtacggtttccttgccaaggtagtggtcgatgcggaatacgctcgacgggtcgaacacctcggagaccacacggtcaagttccttggcgctggccagatcatgaccgaatggcttttcgatgatcacacgacgccaggcgccttccgaagacttcgccaggccgcagtcggccagctggcgggagacctgtggaaatgcgcgtggcggcaccgacatgtagaaggcgtggttgcctcgggtaccgcggtcgcggtcaagttcggccacggtatcggaaagacgctcgaacgccttcggatcgtcgaacgtgccctgtacgaagcggatgccgtcagccagctgcttccaagtcgattccttgaacggcgtgcggcaatgtgcctcgacgttttccttgacgaactccttgaaatggtcctcggtccagtcgcggcgcgcaaagccggtcaggccgaagctcggcggcaacaagccgcggttagccaagtcgtagattgccggaagcagtttgttacgtgacaggtcgccggttacgccgaagatcacgatgctgcacggtcccgcgatgcgtggaagccgcagatcacgtggatctcgcaaaggatttgtccacgtgccggaggtgtcaagcacggatgaaacggtttcagtcatgcaattcatagtaacgcgtggatcctctccatgtcatgacaattccaacagtcaaggttttgtgtcttgtggcttcccgcaaatcatcggcgattcgcggaaagccgttccgaaagtcacagcgaatagcgcaaccagaccgcgccgtcgtcataaggagtgacggattcgagtttcagggcgacgggcctgtggttcatcggcagtccatcgaaggcggcggacatgcctttgcggccatcgatgccggggccgatcaggatgctcacctcgtcgagcagtccggcgtcgagaaatccgccgttgatggtgcctccgccgactacggccatgcgttccacgccgaattcctcgttgagaatctcgctggcgcgtgccaggtcgatgcggtcgcgtcccgtggcgatccacgagatgttgcgtgaatccaggaatgccagatagtcctcggatacctgctcgcaggtcaggatcaccagtggcttggcgctgccggaatcatccgaccagctcagcgtgcctctggtgtcgggaatcacgttgtacccttcggcatcggtcttcttggagaaggcctcatggccgagcggcttgccggtgccgtggaatttcccggaggccatctccagctgtgcggtgacgcgtccgcttacacgggtcggggcgttcagcgccgccagcgtctcatagtattcatgattgcctgccagtcgcacggtcatgccgcagtcgatgcggccatcgatcgacatcatcatgtggcatacgatgtaaggtttgctcatggtgttctcgttcctttcccttggtatgcctggaagcctacgacaaagtgtttcgcatatccaatgtcgatgaaacatgtcgattcatgcaattccgttattgaatctgtgtggttgaaggcgtctgatatcgtccggcatgactcctgcaatgccagctggaacacggggaacgggcatatgcggaagaagaggcgttgaagggtggggttgcctagccccttcgtttcggatcgccaccattcatgaatgcggcgaggcgacgggtcaggcagcgggggagtactcgttcggcgagggcgccggatttcgtgaacatgctgtggtaggcaagtgttcgaccccgcaacatcttgtggtatgcataggtggcgagctgacgggccgtggcgggtctggtcatggtgaagaagttacgtccgctcatttttgcggctttctcgaaaccggttgcggtcggaccggggcatacgcaggtcacggtcacgccggtgccgcgcagttcatacgccaccgcttcggacagcgaacgtacgaacgcctttgacgcgaaatacatggccatatacggtccggccatcatggaggcgactgatgagacgttgagaatcctccccgcaccggcatcgcgcatgtcccgcccatatcggtaggtgagttcggccagtgcgttcatgttgagttgcatcatctcatgctgtcggcgccaagtgccgtccagaaacccagtccattcaccgaatccggcgttattgaccagatggtcgatgatgaagccatgcgaggtcgtgtagtcgtacagtttcagcggggcgtcgttttcgctcagatcgatggcgaacgtttcgacgtgcacgccgtaacgtcgttctaggaggcttttcacctcggcgagtgcggttcgattcctggccgtgatcaccagatcgtgcccatccgacgcgaatagcgaggccaactcgcggccgatgccgccggaggctcccgtgatcaacgcatatcccatgccaactccttcgtcgatgcctgccactagcaccatgataggcgttcatgggcgattctgattggcgctttcgctcctgtgaaatccccgacatacgtagcggcgggcgtttgcaaggcatcatcggatgatttcgtgtcagattttcttgtgatagaaaatggcagtgagcggaatgaagaccatcagggtcatgcctcccgccaacagtgcggccagtgcctcatcgccaagtatgccttgcgtgaccatgacacgataggcatccaccaggtaagtgaccgggttgattctggcgaatgcccgcaagaccgcgggaagggtgtcgatcggtacgatggcgttggagacgaagccgaggaccatggtggtcagggtggacaatgcagagatggtgccggacgatttcaccagcacgccgataagcgcgaacacccaactgacacaccacatgacgaagatcaccagcagattggcgagcagtacccatccgaatccggcttgtggtcgccatcccatgatgtatccggctgctacggcgaacagggaggcgatggcatagcggatgatgtcggcggtcagcataccggtcagcggcgccatgcgggcgattggcagtgacttgaatcgatcgaacacgccggtttcgatatcttcacgaagttgggtgcctgagttcgatgaggccatcagcaatgcgaacgcaaccacgccagggactacggtggccagatatttcgtggcgctgccggccactgcgccgccgaacagataggtgaacatgatcatgaagataagcggaagcagtatgacatctaccagtgctcccggattgtgtttgagcttgagcagtgagcgtttggccagcgtgatcgtatccttcatcagtgtgatgatcgggctgagtgtcgtggtctgtgcggtggtggggaaagtggttgtcatgatgtctccttggtgcttgctgtggggaaagtggttgaatgcgccgggatgattgcatgccatgttgcggtgcgatctacttaccgattgctttgtcggctttgccggtatcttgggaaacgattctgacgaacacgtcatccaatgagggtttgctcgtcgagaattcgtctggggtcagattgagattgtgcagatggttgagcagatccagcatgtccgtcgattccttcatgttgaggatcaaagtatctgattccgatgatcgggagatatgcgttgagggaaggtgtccgctgatgatccgttgcgcgtcccgcatctgatgtttgttgtcgtaacggatttccagatgggtatcgccgatcagattcttcaggtcatctggcgttccctgagccatgacctttccgttgcggatgatggcaatgtggtcagccaactgatcggcctcttccagatattgcgtggtcaacagtacggtggagccttcattgacgagctggcggatggtgttccacatttcgttacgtgtaatgggatcgaggcctgtggtcggttcgtcgaggatgatgagtcttggatgggtcatcaggcttgatgctaggtcgagtcgcctgcgcatgcccccagagaaagcggacagttccttggccttgacattggtcagggaaaattgctcgagtagttcatcggcgcggctgagagcctgtttgcgggacaagccgttgagtcggccgatgatctccatgttttccatggcggtcagatcgttgtcaatcgtggtgaactggccggtcataccgatgatgcgacgcacttgttcgggttgttcgctgacatcgtagttgaaaatcgacgcggtaccgccatccatgggcaattgtgtggaaagcatccgcagaagtgtggttttgcctgcaccgtttgggccgagaatcgagaagatttcgccttggttgatggtgagggagacgccgtccacgacgtttttcgaaccatagcgtttggtgatgccgatggtctgtattgctggaatggccatgtttgctccttggggatggtaatgtccaaaaactaattatcaggtaccctgattgatttcatatagtatgggtacctgaataaatagtcaaataccctgatagaatcggtgtgtcttgaggtggaatccaagccgtatcggaggcgttatgacggatttgcggcggagtgaggatgtcgagcgcgatgtgcgaatcatgcagaaatacatggcattccaaagcgagttcgcaaagaagatgagcgccaggcgtaatgacacgggtggtggtaatccgtcactgttctcgttgtcgagtcgaggtcaggggcgtatcgtcagtttgttacgcgagcgtgggagcatgtcgcagcgcgaactcgcacaggaactgcacgtgcagccgcaatcgacgtcggagatggtgcataagctggagcgcaaggggctgattcagaggacccgaagtgattatgatgcccgcgtcttcgtggtgaggctcactgatgccggagccgaactggccgaggggatgcttcggaccaagcccatgcttctgaacgtgctgacggatgaggagaaactgcagttcgagcatgtgcttgacaagctgttggatgccatcgaaaccggaggggtcatcgattgaaatgactacgaccccttgcgtatgccgcggtacattgtgcataatgaagccgtctggaggtgtgtgatgggcgggagatacaagacgcgttacgattcgccgattggtggcatcacgatgatctcggacggtgaggcgttgctgggattgtggttcgacgggcatgcggaggatagtgacgacgacaacgcggcatggacggacgacctgccggttttcaggcttgccttccgttggctggatgaatatttcgaagggcgcaagccggaagtgcatgtgccgatacggctggaggggacgccgtttcgtgaggagatctgggcgctactgcgggaagtcccctatggcgagaccgtttcatacggtgagcttgcgcatcggttggaggcgaaacgcgccgacggccgcagggtttcggcgcgggccgtcggcggtgcggtgcatcacaatccggtcggcatcatggtgccctgccatcgcgtcatcggcgccgacggcggtcttaccggttatgcgggcggtctcaaaactaaagcccggctgcttcggcttgaaggtgcgctgaagcagccggactgaccggaccgatcgaatctcctatagaccggccttggctatccaatcgctgaccgccttggcggttttgtcggcgttcttctgtgcatcggtgccacgcacggcaaggccggttttcacggtcgcgccagtcgcgtcggcgatgctgcctgacgtcgacgccaggccactgccctcatgcgtgcagaaggggtagatggtcttgcccttccaatcgcggccttcaagaaacgtgtataccggcattggtgcgtcgccccaccagatcgggtagccgaggaatacggtgtcggccgaatctaaggcgtcggtgtcgccgttgagcgtaatctgcgggcgggcgttgtcgcgctgctcgtcctgtgccacactggtgacctcgtcatagccttccggatagggttcgttgcgggtgatctcgatgatcggggcgtcgatctctttggcaatcgcttcggcgagtttcgccgtgttgccgaccttcacgttgcctacgccgtaattctcgccggcgcgggagaaatataccaccaccatgctgcttcctttcgatgaattggttgctgtttgtctggatgattcgggcttcgtatcgggtatcgatccgcatccgccgagtgcgagtgcggtgatgcacagacaggtcgaaagtgctttgcgagcgttcatggtcttccgccgtcccaacgtcatggggcttttgtggtcaggccagtgactggatcgtgtcgagatccctgagcacgcgtttgggctgggcggagagcgggaagtttgcctcgtcatgcacgccgtcgaacgagccggccgcatccggctccaagccttcgaacaggggagacaggtcggcttgtgccgggccttgctcggcgataagctccaacgttttgtggtcggcttcgtcgctgcccagcgccgacaccagtacgcgcgcaatctgtgcgcgtgcgactgcgccgtcttcgggacttgcgtgacgatgcgtgtcaccctgcaggaatacgagtcgttgctggtcggaatcgttgtagtcgaaccagccggggcgcacgatggtgtattcgttgccgctggtgcgcaccagacgttcggaacgtcgtttccaatcgtgcgcctgatagtcacggttgtatttcgaatccatgtaggtcacgccgatcgccgtcatcagggcgatgcgcaccttacgcccatccaaggcgagcagggtgttgcgcaccgcgccgtaatcgatcttttcgatcatcgaaggaccgtcgtgcgcacccatggtgaatacgatgccattgatgccgtccaatgcgcttttcagtgattcgatgctggtcaaatcgccttcgaacatgtttacgcgggcatcaaagtgtgcgcgacttgtgtcacgcaccaaggcgcgcacctgatagccctgggccaatccttctgccacggctagccgcccgatgctgccggttgcaccgacaaatagaacatgggttggtttggtcatttcaattcctccgatgatgagcgctgcgtatgctgtcatcgtatggtcggaaggaagatataacaaatacaaatcagcaatagtaattaatcgaaaaaatgcatatacttaatgtgttgatgcatagtgggcggcggaacgagacgattatggaaatcaaaatattgcgcaattttatcgcggtagtgcaggaagagggcgtcaccgccgcctccgacgtactgcgtatcagccagccggcgttgtctcggcagatcaaagacctggaagaagagatgggtgccacgctgttcgtacgaggcaatcgtgggcgtgcgttggagctgacgcatgaagggcaactgctgtaccggcgtgcgcgcgaaatcgtggagctcgccgaccgcaccaaatccgaaatcgcttctggcgaggagattgagggcgacgtgcatatcgcggccgctcaatcttcggtcatggatgtgcttgccaaggccgccgtgcatgttcgggagctgtatcccggcatccgtgtgcagctgcatgatgactacggcgaaaacatcgtggaacggcttaacaatgggttggccgatttcggtgtgctcgtgcagccgaccgatatgggccgctatgaccattttccgttgccgggcggagatcagatgggcgtgctcatgcgatcggacgatccgttggtggcgaaggatgggatccgtgccgaagacctgcagggattgccgatgatcgtaccgaagggcgcgttggtcaggcgtgacctgtcgggttggtatggtgccgatttaaggccttaccacatcgtcggcaccatgaatctggcctataacgccagccgattcgtgcgtgccggatacggctatgccatgagcctcggaggattggtggacacgggcgagggaagcggactatgtttccgtccgtttgacccacccgtacatgtcgcgctccatatggcgtggaagaaggaccagccgcttaccccgtccgcacaggccttccttacctgtgtacgcgaggtggtggcgaagatggccgaaggctaggtgggtgttccgggacggaggaatccgccatccggccggggctactcctgctgctcgttcggatcgagcatcttgatgacctttgcgggggttcctacggcgaccccatagtcgggaacgtctttggtgacgacggcgccggcgccgaccaccgcgtattcaccgatggtcacaccggggcagatggttacgttcatgccgatccatgcgtttttcttgatggtcaccctgccataggtatacatggaatggcgcgcgttgaaatcatggttgatggtcgcgatgcgaacgcccggcgccacttgtactccgtcgccgaactcaatgccgcccgaagcggacaggatggcggaatgattgatgaacacgcctttgccaaacgtcacgcggttgccgaagtcgcaggtgaacggcgtcaggatgcgcacatcgtcgagcttgcggccgaacagctcctcgagatgaccggcgtagcttgggtcgtcgggcagggttgcgttcgctttcgcgcacagcgtacgggcgcgcatcatctcgtcgaccgcctctttgaagtacggttcgcggttgtcggtcggaccgccttggtccatcagttcgtatacatggcctttgccgtattccatcatgaaatccttcgaatcgtattttgccgatgttggtgcggacctcattatggaaccgaaatcgcaggcaaaccaatgtgcgtgatgggcgcgttgacatgcgttttatgcatgccaacgcaaatccatgcctgacgaccgaggtggatgccggacgagagtcagtcgaccagcgccgccggatactgggcgacggcctgatcaatctgcgcctcggtggaggtggcgacgccctgaatcaggaacggcttgagatacgtggcatgcacgtggcggaacgtcgtttcgaacggggagagcagctcctccatggtacgtacgtggctgccttcacgggtatacgaatccgccggagaaccggtggagacagccaccatgaattccttaccttccagtgcgtgtccaccgccatacgcccaaccggcctgcagcaccgcatcctcccattgtttgagcaatgcaggggagctataccaatagaaggggaattgcagcacgatacggtcatgcgattcgatgagcttctgctcgcgctccacattgatgtggaaatccggatattcggcatactcgtcgattacggttacgtcaccggtctcattggcgatgtccatgagcttgcgattgacctgcgacttttccagatgcggatggaacaccagtaccagcgtcttcatcgatactccttagctttgcgggtccacagtggtggattcatatatgagcatagtagggtggccgcccttattaaacccgtcataagcagcgtcgatagtcgatgggcgtttgtgcgacgatggtgccattagtgtgattctcgaaggattcgtcgggcgtgatgatgaaggaggagatgccggtgcggcagggggaaggcgtgaagaccagggccttgcgggccgccgtgcccaaggtgctgccgatttgcattagcttcttttttcttgccatgtcgtatggcctgctgatgggcacccggggtttctcgttcctgtggcccatgtgcatgagtgcgttcatctttacgggctccatggaattcgttaccgtgaacctgctggtctccgccttcaatcccctcgccacactgatgcttgcggtgatgatgggcacccgtcatgtgttttacggcatctccatgcttggcagattcaagagcatggggctgaagaagccgtaccttatctacgccatgtgcgatgaaaccttcgccgtcaacaatagcgtacggattcccgatggtgtggatcgtggctggttttacttcttcgtatcgctgctcgatcagtcatcatgggtccttggagccaccgtcggcggcatcgtcggcggacggctgaccttcgatacctccggattggatttcgtgatgaccgcgttgttcgtggtcatcttcgtggaccagtggatgaattcgaagcgcagaagtcatatggccgctttgaccggcatcgtcgtgccggtcatctgcctggcgctgttcggagccgacgatttcatgattccctcgttgctcgccatgctggtgatgtttctcatggtccggccgtatcttggcgatttgaaaaccgacgggggattcgacgaacgggagaatcgcgcgagatgatcatgactacctggcagggcgtcgtaactgtgctgatggcggtgctcggcaccgtcgtcactcgattcctgccgttcctgctgttccccgaatccaaacaaccgccacgtgtcattgagtatcttggcaaagtgttgccgtatgccatgaccggcctgcttgtcgtctattcgttgaagggagtacagccgctttccggcagccacggcattcccgaggcgatcgccatcatcgtgatcgtgttgctgcacctatggaagaggaacatgctgctgtcgattgcgggcggcaccatcgtctacatgctgctcatccaactgacattcgtcgcgtagatgcgagcatgatgtggtgtggcgctgtcatcatcgaacgagtgtggcgacagggcggtccgtaacaattgcgggccatcccgtccatagccccctggcatgtcccatatcgtgagaagtaactcagaaatacatttctctcgcttacgctgttgccttagccacaagcaagaagggttcgattactcgaatccggctaaacccaacagttaattgagagagaacgataatgactagtgcagcaagcactgccggcgcccaggtccctgcgcccggcaagctggagttcaaggatgactatacgccggaagaggcgcaacgcgtcattcgcaattcgaaaggcctaccggtcggcgtgaagccgaagatggtatggacttggccgaaggccctgctgtgggccgccatttccattgtgtgcgccattggctgggccattctggccgtgtcccgtggcgagcagatcagcgccatctggttcgtggtcgtggccatctgctcctatgccatcgcataccgtttctatgcgtattacattcagattagaatcatgcgcaccgatgacgcgaacgccaccccggccgagcgtgtgcatgatggcgccaacttcgaacgcgccgatcgccgcgtacttttcggacagcacttcgccggcatttccggcgcgggcccgctcgtcggcccgattctggccgctcagatgggttatctgccgtccgtgctgtggatcattctcggcgtgatcttcgccggtgccgtgcaggacatgctcatgctgtggatttccgccaagcgccgcggccgttccttcggccagatggccgccgacgagatgggcaagttcggtggcatggtgctgtcgatcttcctggtcgtcatgaccgccatcgccatggcgttcctcgcccttgtggccatcaaggccatggccgcctcgccgtgggccgtgttctccatcggcatgaccatcccgatcgcactgatcatgggttgctaccagcgcttcctgcgtccgggccgcgtcatcgaaaccactgtcctcggcttcgtgctgctcgtgcttgacatcgtggccggtggctggatcgccgattccccggtgcttgctccgatcttcaccctgtccgccaaggaactggtcatcgctctggtgatctactccttctgcgcggccgctctgccgcactggttgcttgtcactccgcgagactatctgtccaccttgatgaagatcggcaccttggtgctgctcgtcatcggcatcatcatcgccaatccgtcagtcaaggtgccgggtctgaccgagctcgcctccacgtcgaccgggccgaccttctccggcaacctgttcccgttcctattcatcaccatcgcctgcggtgccctttccggcttccacggcgcagtgagctccggcctgaccccgaaggccctggagaaggagaaccagatccgcatgatcggctacggctccatgctggtcgaatccttcaccgccgtcatcgcactgattgcggccatcaccatttcccagggcgtgtacttctccaccaacatgtccgcagcccagatctccgccgcttccggtgtgaccatcacttccacctccaccgccgacgagcaggccgatgccgccgtcaaggcagtgggttcgatgaaggtctccgacatcgaaggcaaccagatgaaggtcacctgggattccgaggactccaacggcgacatcaagacctatgaaggcgccgaggccctgaagcaggccgcttccgatatcggtgagaagtccatcgtgtcccgtaccggtggcgccaccaccttcgccatgggcatggcctccttcctgaagtcctatctcggtggacagaactccatggccttctggtaccacttcgccatcatgttcgaagcgctgttcattctcaccaccgtcgacaacggcacccgcgtcgcccgctatcagatcggcgagatgcttgccaacgccaagaggctcaagaagttcggcgatccgacttggcgtccgggcaacatcatcactacgctgatcgccactgcgttgtggggcaccatgctgtacatgggcgtttccgacgccaacggcggcatcaatgccatggttccgatcttcggcatctccaaccagctacttgccgccgcctgcttcatgttggtgacggtatgcgtggtcaagatgggccgcgccaagtacgcatggattccggtcgtgccgctggtgtgggacgtggccgtgaccttcaccgccgacttccagaagatcttcgattccaagatcggctatttcgccgcggccaagacctggcagaccaagatcgactccggagaactgactggcgaggcattggccaatgccaaggcatcgctgtccaacgcctatctcgacggcgtgctgtccgtgttcttcttcatcatgatggccactttcctgatttgcggcgtcgtggtaatcgtgaagaccctcaaggcgggcaagttcggtgtggaaaccacgtccgaggatccgttcgtcgaatccgaatggttcgctccgtccagcctgatcgccacatctctcgagaagaaagtcgcccgcgagtatgcggccaagtcctatgagctggcccacgaaagcaaggcggccgcctgatgtcgcgacggttggtggcgacgctgtccaaggcgtggcgtggcgtggtctggtacatgcgggagatcagcggcgaagcaagatacgatcattatcttgagcacttcgccgccgaacatcccgatgaacggccattgagcgagaaggagttcctgctcgcccgcgaagcctatgacagggagcatcccgacaccagctgctgttgctgacaaggcatgatgagcgtccccgtttcccgatttgggaacggggacgcttccatatggtggacgattgcatgcggatacgcactgaattcggtgcaacgagattgatggcaaccgtcgtttcatcatgaaccattcgggctctgacacgcgttccttgcctgtctgtaggctggaaacatgtctttcttcgatatgtttggccccctgttcgatccttcggaaggtgcgaaccgttccgacaggcaacgttcctcgaatgatgatccgatcatcctcaatgtcgagaccgatggcgacaccacttcgcggtccggttcgagcgcgcctccgaaaggtccttcccgtccgcgtatcgcccggcgtcccaaccgcccccgaaaaggagcatcgcgcggcaacaagattctcatcggcatagttctggccttggccatcgtcgtcggcctgtttttcgcattggcgcagttcatcaccgatgtcatgtggtacgaccaacttggtttccaaagtgtgatatggacgcagctgggcaccaggatcggtctgtggatcgcctatgcgctgttgcttgccggtgtcagcttcatatccgcaaccttggcgattcgggcgcgtccggacgcagccgacggctccaccatccgtgtcaagggcgacaccatcgaaataggcaagggcgtgagttccagaaacgcccgtcgcgtggccgtggtcgtctcgctgatcgtaggcctgatcttcggtgcacagttcaactcgaactggtccgaaatcctgctcatgttcaatgcgcagagctttggtaccaccgatccgcaattcggacttgacaacggcttctacgtgttcgtgctgcctggactgcgtctgatcatgtcggccgtatcgctgttgttgctcgccggcatcattttctccgtcatcacgcatgtgctcatgggcggcatccgcatcaccatgccggtcaacggccgtggtctgtttaacatcaccaagcgtgcccgccgtcagatcggcatctggctgatgctcaacatgttcgcttgggccgccaaccaggtggtcggcgtgttctccaccctcacgacggagggtagtcgcattaccggcgcgacctacaccacggtgaacgccaccattccggtcaccttcgtcatggccgccatcaccgtcatcctcggtgtggtgttgggcatatggattatgaaatcccatgctctggaaggccaggctcctatcgctgtgcgtgcctccgaagcgttgaaggcgtggaaggtgccgaccgtggccatcgcatccgccgttgtcgtcagcctggtgctcaccgttgcatggcccatgctgttgcagcgtttccgtgtcaatccgaacgcgcaggagatggaatccacctacatccagcgcaacatcgacgccactcgcgtcgcttacggcctgaacaaagtgaagaccgagcaatataaggccaccaccgaaggcgaggccggcgcgttggccgattccgccgaatccaccgcgcagatccgactgcttgacccgcagatcgtctcgccgaccttcaagcagctgcagcagtccaagcagtactacacctttgccgacacgctgtcggtcgacaaatatgaggtggacggtgtgagccaagacaccgtcatcgcggcccgcgaacttgatcttgacggccttgacaaccgtaattgggtgaatgaccataccgtatacacgcacggttatggcgtggtcgccgcctatggcaacaaggtgaccagcgatggccagccgaagttcttcgaatccggcatccccacccaaggcaaactgacggattccgaacaatacgagccacgcatctatttctccccgaacgcctccgaatactccatcgtgggcgctcctgatggcaccaaatcctgggaattcgactacccgaccggctctgaaggtgccaccaacaccttcaagggcgatggtggtccgaagatcggcaacatcttctcccgtctgctgtatgcgattcgtttcggttccgatcagattctcttctccgatcgtgtgaacgccaattcgcagattctctacgatcgttccccgaaggaacgcgtggccaaggtcgctccgtacctgacccttgacggccgcgtgtatcctgccgtggtcgacgggcgtgtgaagtggatcgtcgacggctacaccacctccgatgcctacccatactcgcagatgaccgatttgggagatgcgaccaaggactccaccacggagacctcgtccaccgtcacgggtttgaattcgcagaacgccaactatatccgtaattcggtgaaggccaccgtcgacgcctatgacggttcggtggatctgtatgtgtgggacgaatccgatccggtcatcaaggcatgggaacagatcttccccggccagtaccatcagctttccgaaatctccggcgatctgatgagtcacctgcgttatccggaaagtctgttcaaggtacagcgtgagctgctcgccaagtatcatgtgtcttccgcgaaccagttcttctccggcgaggacttctggcagaccccggtcgatccgaccgaatcgcagcaggcccagcagcgtgacattctgcagccgccgtattatctgaccttgcagaccggcggatccaacgagccggtgttctcgctcacctcatcgtatattccggcaggttcctcgacacgagagatcctgaccggcttcctgtcggtcgattccgatgcgggcaacgagaagggcaaaatcggttcgaactatggcaccatccgattgcaggagttgccgaaggactccaatgtgcccggtccgggacaggcacagaacaacttcaacgcctcggcagacgtatccaaggaattgaacctgctcgaatccggttccaccaacgttcagcgaggcaatctcctcaccttgccgcttggcggtggtctggtgtacgtccagccggtgtacgtgaaatcctccggttccacgagcttcccgctcctgaagaaggtgcttgtggccttcggtgatcaggtcgggttcgccaacaccttggacgaggcgcttgatcaggtgttcggcggcaattccggagcatccgccggtgacgccgagaacgtcgaaggcggtacttcatccggtaagacggatggcaaaaccgactccagcggccagcagggtgatacctcgcaaggcggatccacggattcgagcaccggaaatgacacgagcggcacggcaagcggcgatttgaagaacgcgctgaacgatgccgcccaagcaatgaaggattccgacgccgccatgaagaagggtgactggagcgcctacggtgaggcgcagaagaagctgcaggaagccttgaacaaggccatcgaactcgagcagtagcttccctgtgcgtcttttcggagaggagtcgtgtccgcgagtgtggatgcggctcctctttcgttattcgggaacgctatggtaggcaaccatgaccgaatatacctatcgaatcgccggtgagcacgacctcagggccatcaccgacatctataatgctgccgtcatcgccggcggttcctcagccgacctttcaccgcgcacccttgaacaacgcaaggtctgggtcgaatcgcaccaagatccatatgcggtgttcgtcgtcgaagcggcggatgacgacggtaacccgcagacggtcggtttcggtgcgttgtccgtgttctatgaccgtgccggctacgacggcgtcaccgatctggcctactacgtcgatcctgcatggcagggcaagggcgtgggtacctacaccctgacgaagctgcttgaggaatgccgcaagcgtaatatgcgcaaggcctgcggcatcatcttcgccgacaatgccggctccatcgcgctgatgaggcgtttcggcttcactcaattcggcctgatgccggcggccgccaccgattccaccggcaccatgcgtgacatgagttactggtatctcgacctgtaagtacaattttcccggtcaacgacagaggaaacagtagaacgggaacgtaggaaagaacgatggcatctgatttctggctgattgcaggattgggcaatccgggctccaagtacgaaggaacgcgccacaacatgggattcatgacagccgacctgctggcggaacgctggtcggtcaatttctccgatcacaaggggctggccatgctcggcaaaggcgtaatgaacctgtcgggccgcaatgtgaagttctttctggccaaaccgctgacctacatgaacgattccggcaatgcggtggcttccatcagctcgtactaccagattgaaccgaatcatatcgtggtagtccatgacgacatggaccttgatttcggccgcatcaaggtcaagtccggaggctccgccggcggacacaacggcatcaagtccattgatcgttcgcttggcacgccgaaatacgcccgtgtgcgtatgggcgtcggccatgcccaacgcggtgcgcacgcccacgacaatacggtgaactgggtgttgggcggattcgggccggaccaacgcaagcagttgcctgaattccttgccgatggcgccgatgcggccgagaccatcatcttcgacggtctcgccaaggctcaggagcagttcaatggccgctgagctgtccggcatccttgacgtactggaaacggatgacgatttccgtgcgctgatttccggtgaggtcgaggaaccggaatccgacatcgatcccagcatcaccgtaggcgttcccgaaggtctacggccggctctggcggccggtgccgccggcagcaggccggtcgtgctcgttgtcgcttccgggagggaggcggaggagacggtcgaggcgattcgttcctggtacggtggcgacccgcaggatgtggcccagttggaggcttgggaaacgttgcctcatgaacgtctgtctccccgtgccgatacggtggccagccgcatggcggtgttccgcaggttgaaacaccccgaagaggggaatgccatgttcggtccgatccgcattctggtaatgccggtgcgatccctgattcagccggtagtggccggtcttggcgacatcgaaccgctggtattcacgcaaggcgaggaattgacgctcgatgaagcgtcgaaacgattggtggagagcgcctatacgcgtgtggaccttgtgatggaccgtggagaattcgccgtgcgtggaggcatcatcgacgtatttccgccgacgctgccgcatccggtgcgtatcgaattctttggtgacgaaatcgatgccatcaagcagttccatgcttccgaccaacgtacgtacggagagccgctggagagcgtctgggccacgccatgccgtgaattgcaactgacggacgccgttcgcgatcgggcgaagtccctgatcggttccattcccaacgccgaggatatgctggaatccatcgccaacgccattgcggtagagggtatggaatcgctgttgccggcgctcgtcgacgacatggaatcggtgcagggcatgttgccgccgaatgcgctgatcatgctttccgatccggaaaaactgcgcagaggcgccgatgatctggccaaaactgccaacgagtttctggctgccagctggcatgtggccgcgtccggtcatggtagtggtgcgcccatcaccttcgatcaggcgaattttcttgacttcgaagagaccataacgtctcttgcgctcttgcagcatgacgtttggaaactcaccagtttcggtgtggattccagtctgcccggccatgtacgaatcgatgcttcgaatccaggcgaatatcgtggtgacgagcacaaggccgcctccggcattgaggggctgctcgcagctggctatgacgtgaccatcacggcagccgcacaaggcacgttggcccgcctgaaacgcgccatcaacgaaaccggcatcaccaacttcgagtgcgtgcgatcccgtgccatcgacggattcgtggataatgcggcgaaaacagcattgctgaccgagcgtgacctgaccggccgcacttcggctgcgggccaggccaaaaccccgaagcgccggcgcaaggccatcgatctgatggaactgaaatccggcgattacgtggtgcacgagcagcacggcatcggacgtttcgttgaaatgcgtcaacgtactatcggtaccggcgccaacaaaaccacccgcgaatatctggtcatcgaatatgcgccgaacaaacgcggcgccccggccgacaaactgttcatccccaccgaccagctcgatcagatcagcaagtatatcggcgccgagtcgccgaaactcaacaaactgggcggttccgattgggcggccaccaaagccaaggcacgtaaacacgtgcacgagattgccgaggatctggtcaaactgtactcggcccgccagcgtacgcccggttacgccttcggcaaagacacgccatggcaaaaggaactggaggatgccttcccgtatcaggagaccgccgaccagctcaccaccatcgacgaggtcaaatccgacatggaacgatccgtaccgatggatcgtctcatctgcggcgacgtcggtttcggcaagacggagatcgccgtacgtgccgctttcaaggcggtgcaggattccaaacaggtggccgtgctcgtaccgaccacgctgctggtgcaacagcatttcgagacgttcaccgagcgctatgagggcttcccggtgaatgtggccgcaatgagccgattccagaccgccaaggaaatcaacgacaccattacgggtctggaggacggcaccgtcgacgtggtgatcggcacgcataagctgctcaatccgaaaatcaaattcaaggatctgggactcgtcatcatcgacgaggagcaacggttcggcgtcgagcacaaggagacgctcaaggcgttgcgcaccaatgtggacgtgctgagtctgtcggcaacgcctattccacgaacgcttgagatggccgtcaccggcatccgtgagatgtccacactggccactcctcccgaggatcgtctgccggtgctcacctatgtcggcgcatatgaggatgcgcagatcaccgcagccgtacgtcgagaactgctacgtggtggccaggtcttctacgtgcacaatcgtgtgcaggacattgcgtccgttgcggcgaagattcatgaactcgtgccggaagcgcatgtcggcattgcgcacggcaagatgggggagaagcagctcgatggcgtgatccgtgacttctggcatcgtgacatcgatgtgctggtatgtaccacgattatcgagactggtcttgatatctccaacgcaaacacgttgatcgtcgatcatgccgatcgtttcggtctcagtcagctgcaccagctgcgaggacgagtcggacgcggccgtgaacgcgcctacgcctacttcctttatgatccggccaagccgatgacccagcagtcgcatgaccgtcttgccaccatcgcgcagaacacggcgctcggttccggtttcgacgtggccatgaaggatctggagttgcgtggcaccggtaatctgcttggcgatgagcagagcgggcatatcgagggtgtgggtttcgacctgtatgtgcgcatggtctccgaggccgtggaacagtacaaggagccggaacgcaccgaatcggtggccgtgagcatcgacctgccgatcgaggcgtccattccggtcgactatatcgattccgacaagctacggcttgaagcctatcgcaagctggccgcggcccgtacggaaggcgatctcgaggaactgcgtgacgagcttgccgaccgttatggcaggccgccggccgaattcggcgcattgttcgacgtggctcgattgcgggccaaggcgcgaaggcttggcatcaccgagatcatcgcacagggccgtaatgtgcgtgtggccaagttcgagccgcgtgaatccgtgcagcttcgcatggccaggatctacaagggcatccagtacagaccggtcaccaagacgtatctggttcccgccccctttgcaggttcgctcgggtcgaagccgatgggctccgacgaggtggtgcagtggacggatcaactgttggacgacctcgattggtctcccacccctcgcaagtgaggatgtccgcagatgtatgtgagcgttcacatgattcgtgtcggaaaagtttgcgctacgtccacaaaacgcactattctaggcattgtcatcacaacctaacgtttataaggagtagttgtggcagtaattgaaagcgtttacgcgcgtcagattctcgattcccgcggcaacccgaccgttgaggtcgttctcgacaccgaagacggtgcccagggcctgggtctcgttccctccggcgcttccaccggtgaagccgaggcttgggagcgtcgcgacggcgacaagtccgtgtacatgggcaagggtgtgctcaacgccgtcaaggccgtgaacgaagagatcgctccgaaggtcatcggcatggacgcttccgatcagcgcgctctcgacgaggtcatgatcgagctcgacggcaccccgaacaagggccgtctgggcgccaacgccatcctcggcgtgtccctggccgctctgtatgcttccgctgaatccgcgggccagccgctgtaccgctacatcggcggcaccaacggccacatcctgccggttccgaacatgaacatcatgaacggtggcgctcacgctgacttcgccaccgacatccaggagtacatgatctccccgtacggcttcgatacctacagcgaggctctgcgcgcgggcgtcgaggtctaccacaccctgaagaacgtcctgaagaaggaaggcctggctaccggcctcggcgacgagggcggcttcgcaccgaagatgaagtccaacaaggactccctgaactacatcatggacgccatctccgccgccggctatgagccgggcaagcagatcggcatctccctcgacgtggcctcttccgagttctacaacaaggagaccggcaagtatcacttcgaaggtgatgaccgtgaggccggctacatgctcgacttctatgagaacctcatcaacgagtacccgatcgtttccatcgaggatccgttccaggaagaaggctgggaagactgggccgccatcaccgccaagctcggcgatcgtctgcagttcgtcggcgatgacctgctggtcaccaacccggcacgtctggccaagggcatcgagctcggcgccgccaactccctgctggtcaagctgaaccagatcggtaccgtcaccgaaaccctcgacgccatcgagctggccaccaagaacggcttcacctccatggtctcccaccgttccggcgaaaccccggacaccaccatctccgacctcgccgtggcaaagaacaccggccagatcaagaccggtgccccggcccgtggcgagcgtatcgccaagtacaaccgtctgctcgagatcgaggaggaactcggctccaccgctcagtacgccggctacagcgctttcaaggcttgcaagaagtacatcgccaagtgagaccgcgctggtaagtgctaattgaaatgcccgccgcatccctcgtcgaatgcggcgggtattttcattgctatgagtacaaagacacgcaggaccggcaaaggcaagtccaaggcgaaaggcacggcccgatatagcagcgcagggccgatcgcttttttcgtgtcattgtttatcgtggcgttggggaccatccagttggtgtcaaccttccatacctacgcattgaatctggcggaactcaacgggctgaaaaaacaggaggcgtcgctgatcgcccagaagcaggagctggagaacgacattgcgagatgggatgacaaagcctatgtaacggctcaggcccgcgaccgtcttggattcgtttttccggaggagcaggccatccgggtgcagcatcccgaagccgtgaccggcgaaagcgctgcgaacgccaatgacgcctcacagagtaagtcgcagaagacgtcgttgccgtggtataaggagatggcttattccttcaaacaggccgatcaggccgatgacaagaaggcggctgcaaatggcggtacgacggaaagcaacggacagcaagacgaatcatccgcaaatacacagaacaacgaccaatcacagtcaggagcgcaataggagtgacacaggacatgacgatcatcgaacaagccgaaaccctcgcggcgaaggtactggccaccccggcgaccgatcaggacattgacacggtgaacaagcagcttggtcgttacccgcgaggcatgatcgccgtcggtgcccgatgcgcgtgcggacgcccactggctgtggtgacccgaccgttgctgcctgggggagtgcccttccctacgacctgctatcttaccggccccgaagcggtgaaggccatttcccatatcgaggctgaaggcaggatgaaggaatacaacgacctgctggccgaagatgcggaggtaaaggctcaatatgagcgggctcatgagctgtatttggcgttccgtcacgagatcgccaaagccgtaggcgatagcgaggagcatatcgagggcaccagtgcgggtggtatgccggtgcgcgtcaaatgtttgcacgcactgctggcccagacgctggttatggggccgggtgccaatccgatcggtgatctcgcccttcaagccattcgtgacgaattcgacccgaacgtgtgccgctgtgcggtcgatatcgaagcgtgaacgtaaaccatagtgaaaacccaaggtgagaagatgaagtctgttactgttgccggcatcgattgcggcacgaactcaatccgtttgaaggtctcccgtgtggatgagaacggcgtggaagacatcgtgccccgcattctgcgcgtaatccgcctggggcaggatgtcgacaagacccaccgtttcgccgatgaggcgttggaacgtgcctatgcggccgctcgtgagttcgccgggatattggctgaacatccggtcgatggcattcgcttcgtggctacttcggccactcgcgacgccgagaatcgtgaagagtttgaggatgccatcgagcgtattctcggcgtccgtccggaagtcattcccggaacggaagaagccgatctgagtttccttggtgcgacgagcatcgtacgcagggatgtcgaagccccatatctggtggtcgatctgggcggaggctccaccgaactggtgctgggcggtgacggtgtgaccaagccggtcacgcaggtgcaggcggccttctccatgaacatcggctcggtacgcatgaccgaacgccatctcaggaacgatccgccgaccgaagcgcagatcgacgaagccatccaagatatcgacgagcacatcgacgaagcattccggaccgttcccgcaggcaaggcacgcaccatcatcggcgtgtcgggcacggtgactacgatgaccgcactgtcgatggggctgaccgaatacgatcattccgtggtcgacggagcacgctgcacctttgaggatgcattcgcggtggatgacaggttcctgcgcatgccgcgtgaggagcgtttgacttacaagaccattcatcccggtcgtgtggatgtggtcggtggtggtgcgctggtgtggagtcgcgtgctcgccagggtttccgaggcggcgcaggccgaccatggtcaggccatcgattccttcatggccagtgaacatggcctgcttgacggtatcgtgctggattacggcaccagattgcttgctgcgcgctgacgtggcataatatcttcgcatcgtcctttcggggacgatatgcctccatggcgaaatcggtatacgcagtcgacttaaaatcgacctcttcggattgtgggttcgagtcccactggaggcacggaaaagcaggtggcagtgactccgagccaagctgggcaatgccatgtgattgatatccgccgatgaatgtgcaatgtggctccaacatggattggcgtatccatgttggactgaatacgaaacataccgttattacactgactggcgttgataacccgtagattccatacgaacggaaaaatgacatgacgtcgaaagataccagaccagtaatcgaacagcccgccaccgatattccgctgatgctgtcgcaggcaatcatcatcggcggggtgctttgcatcggcgaggtgatatgctccccgctgtactacacgttgctgaaaagctctctggcgttgttgccatgggctttggaagcatgtttcatggcggtggccttcacctatgtcgtcggtttcgcgctgctgtggtgctccgagtcgttcaccttcaaactacgcgagaaattccgtgctttcggatacgccgccgtgggacttatcggctatggcgtatggagtctgctggtctttaccgcaaccatcaattccgtattggccaacgtaggtgaatccgtgctcaccaacgggcaggtcggggccattgcgctcaatggcgcggcattgggcttcatcgcgtttttgctggcgaaactgctggatgtcgaactcgccaatcgcaagggcatggccatcgctatgctcattgcggaaattgtggttggccttgtagggctgcttatcatgattcgcatgttctctgtgctgtaccgaatgtccggattcgtacggctgtcgttcaggaaggcagggtgctcgtgttcagcattcttgaaatgttcaagattggtgttggtccaagttcctcgcataccgtcggacccatggtcgcggctcatgaattcgtgaccgcgctggaacgtgacggttccctcgaacgggtaggtcgcgtgcgaaccgtgctgtatggatccttggcgcttaccggattggggcatggtaccgatagagccacagtggccgggctggaaggcaatatgccgcaaagcgtcgatactgaccatgtgaacaccattcggcaggaatgcgagcggtcgggtgagctgtcgctgaacggcacgcatcgtattccgttcgactacgcgcatgatgtggtgatggatgtgtggcatcgtatggcggcccatcccaatggcatgcgattccaggccttcgatgcgtacgacaatctgatcgaggaacaggtttggtattccatcgggggagggttcgtccgtcgaggatccgtcgaggatccgatgatcggcatccacgatcggcctccggcaggaagcgccttttcggaacgggacgatgattcttccattgataccgccgcagtaccgtatcccttcacgacctgcgacgagctgatcgcattgtgcgacgagcatcatatgaacatcgccgacatggtgtgggccaatgagacggccatgcgttcggcggtgcaggtgcgcagcgagctggataacgtgtggcgtgtgatgcgtcgatgcgtgcagcatggctgcaacaccctggagacggtgcttcccggcgggctcgaagtgccgcgcagggcaccgaagatgtatgccaggcttgcgtccaacagcgatgtgcttggcagtgaccgccgccgtgcggatgccgtactcgaatcgtccgatgcggcatgggtcgatctgttcgcgctggcggtatcggaggagaatgccggcggcggcagaatcgtcaccgcacccaccaacggcgccgcaggcgtcataccggccgtgctgcactactactggcatttcgtcgatcatgccggtgaggaaggcgtggtcacctttctgcttaccgcaggagcgatcggttatctgttcaaacgcaatgcctcaatctctggtgccgaagtcggatgccaaggggaggtcggaacggcttgttccatggcggcggcaggactgtgtgccgtgatgggaggtacgccgcgacaggttgagaacgccgccgaaatcggcatcgaacataatctgggattgacttgcgatccggtcggcggacttgtgcagattccctgcatcgaacgcaacgccatggccgccaacaccgccatcaatgcggtgcgcatggccatgttgggggatggcacgcatatcgtcagtctcgatcaggccatcaagaccatgaaggataccggtgaggacatgatggccaaatataaggagacctcgaggggtggtctggcggtcaacgtcgttgaatgctagtttgaattagtgctaatctaagtggcattgtgtttttcaaggaggttcatcatggcatctgaaatgcctaccgcaaccggcgaattcggcgatcgtccggcgttcgagttcccgtccgagaccgccccggccggtctgaaggtcgtggagctgttcgaaggcaacgggccgatggtccgccgcggcgataccgttaccgtgaactaccatggtgtggtctggggcaaggacactccgttcgattccagtttcgaccgtcatcagccggccagcttcggcattggcgtagggcaggtcatcaagggctgggatcagaccgttccggggcataatgtcggctcccgccttatggtctccattccgccggagtatggttacggctctcgtggcgtgccacaggccggtatcggtggtgacgacaccttggtgttcgtaatcgacatcatctccacccgctgacaaccggtatcattcttccaaggtcaaggaggacgcaatatggccgaagaaaagacgctgctgctcacgcaggaagcctatgacaagatgaaagaagagctcgcttggcgtgaaggcgagtatcgtgacgaaattctctccaaggtctccgcggctcgtgccgaaggcgatctgagtgaaaacggcggctatcaggcggctcgcgaggctcagcgtgtaaatcagggccgtatcgacgagctgaccgtcaaattgcgcaatgcgaagatcctgaccgcccccaaggagggtgaggtcggcgatggctccgtggtgactcttgaactcaacggccgtgaattggtctatgtgctgggaacgcgcgatctttccatcgccaccgactatgacatcatcagtccggaatcgccgatcggtgcggccatcaatggtgcgcatgccggcgataccgtgtcgtacacggctccgaacggccgcgagatttccgtgaccatcaaggacgccaagccgctcgtctgaatgcggtgagcacgtcgccaatgtgatgtacgaagagcgggtcccgtcgaaacatgacgggacccgctcctttagtatgtgcagccgtcatacggccactggccacgaaccggcaggctatgccataatcgtccacaattgcacgatcaccatgtagatggccaccatgtggcaggcatatccggctacggtccccagatggaagatttcatggaacccaaacaccttcggccatgggtcgggttttctcaggccgtagacgatggctccggcgatatagcaggcgccgccggcggcaagcagcaccacgaccgcaggcccggcatacggggaaatccagaacagacccatgaaggcgacgccggaaacgccgaagaagatgtagacgatcacatacaaccaacgcggcgcactgatccagatcacatggatgaccagcgccacgatggtgcacgtccacatgccgatgatgatggagtcgcgccaaaatgagctgagggcgaacgagacgggagtgtatgttcccgcgatcagcagaaagatgttcatgtggtcgatgcgacgcaatacgtcggtgacccgaggcgaccagtcacccagatgatagcaggcggaattgccgaacagtaccaacgagcaggtcatgaacaccgcgcacgcccatttcaggcccgtcccgtgtgccaggcagatcagtacgatgccggccgccaatgccaatggtgcggcgatggcgtgaagccagccacgcaacatgggtttggggcgtccgtgcacgtcaaggcggatcttgcgttcgatttccgcggggacgatgccttcgaccttcgccgcatgcgcttcacctttggcgatgatcagcttggctttctcgtcggcctttcgtcggatgttctcggcctgattgcgtgccttgattcgaatcacgtccgctttggcctgcaacgcctgttctcgcgcttcgctaattgcggcgcgttttgcctctatctctgcttcggtgggtttcgccatcgtgcgcctccactatatgttacggaaccgtaacctacgttaccgtaacatgtggatatgtcaagcggcatcttcgccataccgacggaccatgacgcgcgtatcctcgtgtgcgttgcgtatgatggggtgcatggctgatttctcacatattctgacgactcgaccggatttcgatgacgaagatcgcgaatggctgcatcatctggtggctgactggcaggtaatcgcagacctgagttttgcggatctgttgctgattctgcagaacggcgatgggaagtacatcatagccgagcaatgccgaccgtccacggtgatgagtttgaggaccgacgatgtggtcggcgacgaagtgcccgcggatatgaccggcgaactcgatgccgccatgtgctccgaaacggtgttccgttccacggtgctgcgcaaagtcggcaactctacggtctgtaacgtgtatgcgcccgtacgtcacaatggcaagacgctcggtctggtggttcgcgaaaccaatatggcgacgcgcgaatcgaacggccggtacgaatccgaaagcatcggtgcaggcaagcagttgtatgagatgattccgcgaggtcagttcccgtaccgtaacccgatcatgaaccagcggcataacgcccgtgtatccgacggcttcattgtgctgacggttgacggcatcgtacgttacgcttctccgaatgccatcagctgcttccgtaggctcggctcggtcagcacgatgcagggggagtacctcagtgagatcggcaccagactgctgcatgagaacgatccggtgctggagacgctgccgttggtcctgagcggcaaggcggcggtcgattccgagctggacgccaacaagtcggcggtctcgatgcgctcattgccattgatggataccaatggacgctgtggcggtatcgtgctttgccgtgacgtcaccgaactgcgtcgccgtgagaaggagttgcagaccaaggatgcgaccatctccgaaatccatcatcgtgtgaagaacaatctgcaggcggtttccgcgctgctcaggctgcaggcacgcaagaccaagtccgaagaggtcaagaaagagctgaaggaggcccagcgtcgtgtgcagaccatcgccatggtgcacgagggcctgagccagaccgccgacgagatcgtggactatgacaaggtcatttccagcctgttgaagatggccgtcgatttggctaccatgcgcgaccagcacatcaacatcgacttcatcggcaagttcggcatgatgcctgcgcaggacgccacgccgttgtcgctggtgcttacggaattgatcaccaactccgtggagcatggcttcgagggacgcaaggatggccgtattacgatttccgtgggtcgtggtggcaacaacctcaatgttgtggtcgaggacgatggtacgggtctggccaacgaagaacatgatggcatggcacgttcctccggttccgggttgggcacacaaatcatcaacaccttcgtcaccaatgattttggcggcaccgtgcgttgggagccacgccatggcgggggcacccgggtggtgctggatatgaagctgcgtgcggcccaggactgacccgggacgagctgtaccgaaaaaaacgaaaggccggtcggattcaatccttgtgaatccgaccggccctatgattacgatcgatgtgcccgaaaaccgtatcagacctgcatctgcatagcctgggaacggcgtgcccgcatggcacgacgcttcagggcgcggcgctcatcctcactgaggcctccccaaacgccataatcctggttggtgtcgagcgcgcacttcaggcacgcatcaatcaccttgcaggtacggcagacggctttggcctcttcaatttgctgataggcggcaccggtgttaccgaccgggaaaaacagctccggatccttgtcacggcacgcggccttggctcgccagtcaaaagcactgctcatatattcgccttcctcctgccttagtggcactgtaagtctgttactcagataaccacgaatcacacgacttttcaagagtccttgctaaaaagaatcactcgggtctgcgaaatccttccgttccacgcactggacaagacaggccgacgcctgacgtatgaacactgcacggccggcgatcatgtaatcatcgggttcgaatccatccagtatcgggcccggaatgccgttcatcaggtcattggtccgatctccggtcgggaacacgatacgggtggggcatcggtcagcgagtatggcattcggcttctccacggcgcagattacggtgacatcgggatcagccaatgccatgcgcaggtcgttggccgcatcatcggtgcgaaatggatcgagcagatcgtcggcgtcgtccacgaaccaggcaagacgcccgtggccttcggaaacgtaggtatcgcgcgtatgccgggcatcatggttttccctgccggtatggtagacgttccgtatcttgtaggtgtatcgcaccatgcgcatgccgctcagatacaactgcgatgcgcaatgcagcagaagattcgtcttgccgcggccataggcgccgatgacggcgatattgccgtgagcgatgtccagggagatgggctcgacgacgacgccgttatccgccagtgcgaacggtatgccatgccaaggttcatcgccgaacatccgcaaatcccgcatggtcacatgttcggcgagcggtgccgaaaagagaggttgttggagcgtgcatccatggaagcgtgcggcggtgtcgatggcatcgaccaatgtctcaacatgacgtaccgcactgcaacggaaccccatgactcgttggccgtcatggcagtaggcgcctcccggcatggagggactgatgtctgcggcggcattggtgccgatcaattcgtgggattgcatccgatcggtgactcgtaggcagacgttcagcgagatattggccttcatgtcggcatgcacctgccccacaggattctgggtacagacgatcagatgcatgcccagcgaccgccccaacgaggcgagccgattgagtcgttgcatgtagtcgggcagcagatcgcgcagggcatggaattcatcgatgaccaccacgagccgtgccggcggatgcttcagttgattgatgtgcgatacccgctcctcactgaccagcgcctcacgccgtatcagttcccgttcgatggcgttcaaggcacgtatggcatgcgataggtcgagatcgcatacgttgccgacggtatggggcagatgctccaacatgttgaacgtcgatccgcccttgaaatcaagaaagacgaaatgcaatgcctccggactgtaccgtatggacagtgccatgcaccaactgatgagcagagcggactttcccgatccggtggtgccggccaccatggcatgaggtccggcgtgaaccagatcgatcgcgaacggtgcatgagcagtcatgccgatgtcgcagccggaggaattggtctcgaaccagcggcgtactatgctacgccatatcaacggatcgtcatcgagatgatgcaattgctcgaagtcgatgcagggaattcgtgagagatcggacgacgaccggctcgattgccaggccacgtcgggcgatgtctggctgttggagatgccggtatccgcctgcgacgtcgcctgacgggcacgtctcgaccgtatcgccatcacggccagcgacagtgcgctgccgagcaatcccggagcaagcatcagcacatacagccagtgacgttgcatgcacatgatgatcagcatgacgaactgcgccagtaccggagtggaccaactgagcaacatgagccggtcatcgtcgagttggggatggtgagcgttgttcatgacggcagtctggacgccgccacgaacaaggagcaagtcgaatcgggggttgtggtcggaggacgtgggttatccacatcctccggcgtgtcgtcagctttgctcggccagcgttcccacggtgccggaggcatgcttgcccgttgcgagctgcgagaacagatcgagattcttctgctcatcgagcagtacgctcgagccgacgccgtcgacataataatcgggatccgtccaatacacgcttcccgagatgcccttgtctccggatgcgctcttgaacgccaacgccatgcgcagcagggaagcggtggaagccttctcatccaccgtcacggaactcaatgcggcctgggccacggttttggccttggcgaagttcatcagggtctgtcgggacgcggcctttttgacgatggcgttaatgacctgtcgttgccgcgccgcgcggccgaaatcaccttgtgcatcggcgtaacgcatacgggagaacgccaaagcggtgttgccgtccgcggtatggcaaccggcggtccaattcagactcgaatacggatcgtccacatcttggtcgtagcacagttcgaccccgccaagcgcgtccacgaccttgaccaggccaccaaactggatcaacgcgacatggttgatcttctgtccggtgatgtcctcgacctcgttgaccaattgcttgccgctatacagctgggcgacggcattgatcttcatatactgctgatcgatctccaccaaggaatcgcgaggaatggaaatcagcgacgaagggcctgacgccggtttggtcagtaccagaatcgtatcggtgcgaaaaccggtgacctctccggtgtcgccggtggtgccgtctcgttcgtcggatccgagaatgagccagctttccccagccgtatcagccttgcttgtgagccaggacttcttgttgagctggccgtccacccagttccaagcggagaaaacggacagtccgagcgccatgatcagcaccaacaggaccgtgagtgctatgcggccgggattatggcggttgcgtgacttcatctttacggccgatgccgtgcctgcggagactccccgtgcagcgggggcggaggatgccctgctgatctgagtcgttccccgcacctgccctgttcgcgcgtttgccggagcgaatgaggctggggtttggctcgcatgcgtccggtcaccatgtgattgggcgtcgcggtttgagggagtgatgcggcgaggggcattggaaggacgggtcgcggacggttggaaactacgtgggacgtcacctgacacacccgtgccggaacgcgccggcttcgcagcaggggagaagctgggaatctgcgaagccgcaccttgggccgccggcttgcgtgactgtgatgtcgattttcgacgccctgcggacggaatgaagcttggcggtgtcccgtgcggctccgtgccgccggtttcttcggtcatagttcctccagtacgaatcgtccctacacccatttacaccgagtggaaccgggaagagtcgtcaacggcctagttctttgccggaacggcacataccgtggcattcagataacggtctgcgatgccgatgtactgaccggtggttgcatcatgaatcgaaccatcttccggatcgacggtgccgccggtgttcgggtcgatcagtgtgccgtcggctcgggtgatgaggccggtcgtcgcgtcgggggtttcggtggattgtgcctgttcgccgggattctcatcggtgttctgggattcagtggtgccgtcggtggtcgtcgaatcagtgctggttgcgttcgtctcggttgattcgaagagcgacttgccttcacgcatcttggcccatacttcgtcggcgttatcggcccaaacggatcggtttggatcggacggcgccgcgaccactgggacggtctgcgtgtacaggtgcgacatgttgaagttcttcaggctcatggccaggccgaccagagcggcggtgtcggccatgccttcggagatattgagggattccagtgcggatttcgccaactggtacagctgtgccgtatccgtgaacaggttcttgctcagggcttcgctcatcaactgtttgatcagatactgctggcgcgtggtgcgggcggtatccgaaccatctcccaaggtgtagcgggtacgggcgtactgcgtggcctgagtgccatcgagatgctgcataccctttgacagctgcaacgtggagtaggggtcatcgatatcctgcggcacgcagatgtcgacgccgccgatggcatcgatcatcttcaccagaccggcgaaatcgacgacgatgaaattctggatgttaaggccggtcagactgttcacggcgtttagcgtgcagctggccgcagaggccagatcgccgccggtctggtatgcgccggcgaagatcgagttgaacatcacgccgtattgcgcgggaatggtgcccttggaagtctcacattgtggaacgtcgaccaaggaatcgcgggggatggataccagattgatggccgagcggtcggcggaaatctgcagcaccatggcagtgtcggcctgatgattgcccgtcatgtcgccgccgatggcctggttcccctcaccgtcacgcgagtcctgaccgagtagcaggatttcgatcggcttgccggaattcggatcgatgatggtcggttcggccgacacggatccttgtccgatcacatccaccttctggtgctgaatgacattgtccacgtccagccatgtcgcggcggctgcggttcccgcgaacaccagcatggccacgatgaccgatgcgaccacggtccgcgcgcgatgctgcacgcggtacccgaggctgtgccttggattggagtcgcgcaggccattgatgttaggaagcttgttgccggcaggagaagaggtcacggtatcgccttcctgatcttgaagtactcgcgtcgatcgttcgacgcaccctgaaaacatataacactactaaagcatgtgattataggcccatcacatgagattcaccgattctacggcaaatcaccttatccgcgtggacaagaaggaagggtgtaccatatcacgccgaaagcaagggtattgacacgtcatgaaatttgacaaaagcaaattgcatgtgtgtaatttatgacgttgcagaaggtgcacattatagataaaggagggacgcatgtggggcgttgtcggcgattcctccgaaaatccgcttgctgaactatgggggctgttcaagcaggatgatgatgtgtcatggcagcacaaggcgttatgctcgcaaaccgatccggaagcgttcttccctgaaaaaggcggttccaccagagacgccaagcgggtatgcgcacaatgcgaggttcgtgaacaatgcctcaaatgggccatcgaccatgacgaacggttcggcatctggggcggcatgagcgaacgtgaacgtcgtcggtacaagaaagaacgtagggagcgtgcgtgacgcatggcgttccgcatgcgtacacttgagctatgagttccattgccagcagcgatattcaagagaccgtgaccggcctgctgaacagtaggccatattctcatcgtcaggatgtcgatgcatccgtcgccgcggtgataacggtagaggaggatctgcgcttctttccgtccaccttcaccgcagtgctgtcgcagcggatgttgccaggcaccattgtggtggtggactgcaccggcggaatcatgcagcccatgcagatgtccttcgaaatcattccctccccggcaggaccgatcatcgaaatgccggagggcaagaccgtccgcgtggtgctgcttggcgtcaagggcgcgacctccttctcgaatgccgttgtgcgcgggatcggcaagatcgatcttgatccatcggtgcagaccctgtggctgatgcacgacgattccaggcctgccgatgaatactgcctggaatcgttgctggatgcctggcgcaatactcccacggcatcgctgcttggtgccaaacagcttgactggcagggcgagacgttgcacgacgtcggtctgtatgccggtaaccacgatgtcacatccttggtggtggatggcgaacccgatcaggaacaatatgatgggcgacaggacgtgttcgcggtcgatctggcaggcgctttggtgccgttgtccacattgcgatccaccgaaggcatcaacccatggttcaccacatatggggaatccattgatttctgccgacgcatatgtctgggcggcggtcgtgtggtggtggttcccaaggcccggatcgcccacaggagagcacggttcgagggtgtgaggaccaaggacggacagccgttggatgatgaggaccgcatcgatccgtatatgggcgtggtcgtatccgaaacccgatattcctacacggatcggcatcgttcctggtggccgttgttgtggctgtggtccatcgtacagtcgttgggactcgcaatactgtgtctgactcgcaagcggccatatgaagcatgttgtacgttggcgttgccgtggaggaccctgtggcgcctgccttcggcgttgcgtgcgcgaggcgaggtacgcaggcaaagcaaggtttcgatgaagtcattgtccacgttgcaggtgacccgccagcagatcgcacagtggcgtgaccgtcgccaggcattccttgatcagcgcaatgtcgtggtactcagtcctcttgccaaggagcatctgcgcagaagactcgttcgtcgttggtctttcgccctgatcgctgcgatcatcgcattcgcatggatcgccataccgtactggaatgtattgcgcgaagtatgttccggtgcggtcatgtattccgatacactgctgcccacgtcggcgaagttttcgcaattggtcgaaacggcgaccacatcatgggcctatgcctccggtaccgggatcagtgcgccgagtgccccatggctgctgatattggtgtgcgtgtcggtgttaaccgcgggccatgtcgcggcggccgtcgcagtggtgttcttcctgtccgccccattgtgcgtgatgtcgttctgggctttggcgggcgttttcacccgatcggatacggtacgctccgtgaccgcattggcttggttcgcattcgcagtggcactgggcatctaccgcgacgccgatgtcgccatgatgacggtgatggtgttcctgccggcggcattcgccttctcattccgcgcggtgggtatgtatcgtacggaggagccgacgcaaccccatgcttcggtgcaggccgccgcaatcgccgcactgtgcttcattccggtggtcgccgccgaaccgcaactgctcttgccgctgatggcgtcgttcctgctgttcctgatgctggtgcgcagccacaggccggcattgttgctgattccgttgcccgcggcctttgtgtgcgcccctacgttggtgaatgcggtgcgtttcgctaccgtcggatcgtggcggcagattttcggcagcatcatgcttccggattccgcgcacgatggctctcctgcgatactcaacctgtccgatgtgctttcccgcgcgttcggcatctccacgatgccgaagggcatttggggagcgttgatgctggtgttgctggccatgctggtgttgctggccgtagtctcgttgttccttccttttgccctgcgtgtttcgcgcatgatgtgggtggtatcgctcgccggattcgtgacggcactgctctccgcagcggtgacggtagcggttgacgcggacggtgtcgtggccggctcggtgttgccgggtgtctctttcatgatgatgggcgtgctggcctgcgtctgtcttgttgccggcggtgccgtacagcgtttcgtgtcattacgcgaatcggcgagcggtgcggtgcagatcgaaacgcggcatcgtgtgctgccgaccgtaatccgcacggcacgcatcgccttggtatgcctgctgctcgcctcagtggtggcctgcatgggttttgactggtttgaacatgatcggaaccgggtgcatacgagccgttcgggattgcctatggtggctgcggattaccttgagcaacggtccgaccatcgtgtgctcgccctgcgtgccgacggcgccaatcatgtcagctacaccgtgatgcgtacacagtccggcgatctgatcgacagttccccggcgcaacgcatcgaaatggttgcaggccgtgtcgacgatgccaatgcgcgcatcgccaaggacagcgcgcgcctgctttcgaacgccgatgccgatgccatcgccgatttgagcgcgttgggcttcggcggcatctatgtggtgcgtgccgacgacaacgcgtcccagaaggagtcagccgatcagctgagtgcgaacatcggcgcatccgacggcacgcaaagtgtggtgagttccgagcaaggcacctattaccgcctaaccattcaggactcggccaaacagcatgtcaacggttcgggaatcagaacggcaacaagcagcccatggcgtttcgcatggctgtggtgcatgggcgtcattatcgcgttgtactgcctagtagctgcgccccgtatccgtcatcgcaatcaggaggcagcatgagccgtcattctcgtacccgtacaggtgtggccttgcgggtggcgctcgcaaccgtgtcgacggtgatcatcatcgcattgatggtcgtatcgctggtctaccgtccttcctggctgaatcctgattcatccgcgatctcacgatcattggtgtcccataccgtaagcccgacgcagttggagacatattgcccggctcgcatgaccatagccgataccgaagcctatggcgacagcgaatatcaggcatccaacggcaatgtcgcatcctccgtgcgatacacggcgttcggatcagtgttccgttcgtcggcgcttacgttgggatcggaggacacgtcatccgcaacgacgttgagtaagcaggatgcaaacgatgatgacgaaatcttcgtggcttccggcaacgtcgatgacggcgccaaactgcaggatacccgtctgctggcttccagcgacggtaccggagccgtctcgtcggtgatgtcgtgggctaccgacggtgatttgaaaggcgtttccgcagcctcctgcgtggcacctgcactggaacaatcgttcctggtgaccggcactcaggcaggcatgacccagcagctggtggtggcgaatccgtccgccaaggccacttcgctgacggttaaggtgtggggtgcggatgcctcgggcgcattggccctatccacgggttccacgcttaccgtggcggcgaatggtgagacggtgatgaatcttgcggccgcagctgccaagcaggatgcgctgtacgttacggtgtccagcgatgagacaccggttgcggcgatcgttcgcagcatcgccatggatggcctgacggccaagggctctgactatgcggtcgccaacaacacggcatcgaagaagctgggctttggcacactgaacgaaggcgatgcggtgaaactgtacctgttcgcccgccagagcgccgatgtcacggtttcctgggtggatggcaaaggactcaagcaggcgcatcggcagaccatcgaaggcgatcgggcgtcggtcatcgacctgggcgacgtgcccaagggggtgacgggcatcatcatcagctccagccaaccgatttccgtctccgcgaagatcgatgacgacggcaacgacgggcaatccgattttgcattggtgaatgcggcaagtccgtcgcatgtctccgctgtggcgatacccgatcaggcttcggcgaaactgggtgtcatgaatgcttccgatcaggaagcatccgccgtgctgcgctgctatgacgcagacggcaagcgaatcgacgaacgcaccatcaccctgaaggcgggggcggccacgatgttggatcttgcggatgtcgatggtaccgtggcggccgtgagcctgaacgatgacgacggggccatggtatggaacggacgcatcgggcaggaagacgtggcaaaagccaagatggcgggcctgtccatcatctcgcccgtcgatttgaaggagacgaaggagcggatctgggccaacgccgacatgaccgtcgtacggtaatggcctacataccccagtcaggatcgatttcttcgggacgtcggccgtaaagttcagccaaacgcgagaccacttcgtcacggatggcgaactgcagatccatgcggctgcgtgcgtgggactgcagcggcatgcgatagagcacaatgcgaggcggtatgccatgatcagcggggaaacactgcgatccgaagtgaggcacggcctcccaaggggcgggatcggacggcggcacatcctcgacggcgaactgcacgggagctaccaattccggccatgcgccattaagacgtcgaatctgcgccaccaccatatcgtcgaacatgccgcttctcgtacgatatcgaggcagacgcgtaccgaacataggcgttcgaatgccccttccatgacgattgcggtacactgtagactcccaaggcagttgatgcatagcctctaccatagcaaggcggaggtcgtgtcgtgcgctaccataatgacattggtccagcgcgggaaggaaggcatacattggcggtggtttcagtaccgatgtggaacgacgtggatgtcgacgccctgtgttccggtgcccgtgtggtggccttcgaccttgacaatacgctggcgcgctcgaaaaaacccatgaaggatgacatggccgagcgattctcgctcctcaccacgctgattcccgtggccgtggtctcaggcgggaaatacgccttggtgaccagtcagatcaccgaccgcctgactgccgaggccaatcgattccatctgcatctgatgccgaccagtggtacccggtattatcgctgggacggcggggcttgggaacaagtcttcgcccgtgacctcagtagcgaggatcgcgccaaggccatagcatccctggaacgcaacgccaaggcgcaaggtgtgtggtccggcactccgtggggggagcgtatcgaggaccgtggtagccagatcactttctccgcactcgggcagaatgcacccgtggaggcgaaggaggcatgggaccccaccaatgagaagaagaatcgccttgcgcaggcggtcgctaccgatctgccgcatttggcggtacgttcaggaggctctaccagcgtcgatatctccgcgcgcggcatcgacaaatcatttgcggtgcaagaattggcgcggattctcggcatagacgtgcatcagatcatcttcgtgggagaccgcatggatcccgatggcaacgattatccggccgcagtggcgggtacgcgtgccgtacgcgtcaccgggcccgccgacaccgtgatgctgtgtgacgacatcatcgaatccctgcgtgggcaagccgggtgatcgcatgggggaggcggcgcgcatggcggcgatgatcgccgacctgatgttccccagaggttgcgcaggatgtgactgcccggatgccgtgttatgcgtggaatgccggaaactgttccaccaacatgtggagcgatccttgccaggcgttgtgatggatcgctggtttgcctgcggttggtatcgcggttccgtacgtcgcgcgattctgtcgtggaaggaccatggtgatgaggaatgtgacgggccgctatgcgagatgctgcacgacctcgcgcgatcctgtgggctgattgatctgcttcgtggcggagtgccatacgatggccccattctgattattccggcgccatcatcccgacattctgtacgtcaacgtggacgcagacatatgatgcagctcgccaaacgtctggcccgcgacgttcggaggacgggcctttcggcaaaggcttgcaacgcattggaaagcagaggggtaacacgcaggtcggtgcagatgcaaggcgtcgttcagcgttcccggcgattgaagggccatgttgccgtccgatcgggaatcgatgtacgtggcgtgcccgttgtgttgattgacgacatcatcacatccggtaccacgatgcgtcgctgcgtcgaggttttgcaacgggccggcgcgaccgtggtcaccgtgctggcgttggcttacacgccgcccggcggatcgacgcaggaaaacgatcactcgtcatcggcggtgtgatatttcggcagggtgatttcaaaatcggcgccacgttggtcatcgaccacgcgtacggtaccgccatgcagctgtgccgcccatcgggcgatcgacagtcccagtccggtgccgcccgattcggtgccgggaccggttttgcctttgacgaagcggcggaagatgtcggatcgtgcctcttgcggaatctgcgagccaaaattgaccacattggtcacgatggtaccgaaatccttgttctcatgcgcctcgatgagcaccgtggtgtcatcggcggaatgcttgagcgcattggcgatgatgttggtgaacagctggcgcaggcgatcctggtcaccctccatctcgatgttggcgggtatgtgcatttcgatgtcatgcgcatggccggcatccgctatctccaacggttccacggtttcgtcaatgaaatcacggaaattgaacttttcgatctggagactggctgcgccggcctccatgcgcgacagatccagcagaaacgcgatgaggtcggacaggcggtgcgtctgattcaggatgctttccagattggccggcgtaggctcgaccacgccgtcggccatgttttcgaccatggcctgcaacgccgagaccggagtgcgcaattcatggctgacgttcgctaccatatctcggcgcatctggtcggcatgctgcagttcctcggccatctcgttgaaggagatggccaactggccgacttcgtcgcggctgttcgaatcgacatgcacgcgcacggtgtaatcgccatcggccatggcctcggcggcgtctcgcatctgacgcaacggagaggtaagcccccgggagaagaaataggtgatgcccaaagccacggcaagcgtaatcggcatggcgatccatacgcttaggcctactttaagcaggaaccaggccatgatgaacgcgatggccgtagcgatgacgatcaacacgctcagttcgattttcaacgaggacagcaaaccaatggggcgttcggtctccaatggattgaccgaacgccccttattcgaatcggaagtacgcatattaccgcatactactgctccggtggctcgaatgcatagccgacgccatgtacggtgcgaatggtctgcgaacccagcttgtggcgcaatgccttgacatgcgagtccacggtgcgggtgccggaggcatccacccagtcccacacttcttcgagcagcttctcacgggtgagcacggacttgggcttgcgggccagcgtggccaacaggtcgaattccgtgggggtcagatgcacctgctcgccattgacggtgacgatgcgttgcgccggatcgatgaccagcgaaccgaaatcgaggatcttctcgttttcggagttctttgcgatgaccttggcacggtctacgcggcgaagcaacgccttgcaacgtgcgatgagctcgcgcatggagaacggcttggtcatgtagtcatcggctccggcaccgagaccgatgaccttatcggcctcgtcgtcccgcgccgtcaggatcagcacgggaaccggacgttccgccacgatgcgcttggtcgcttcaagaccgtccatcaccggcaacatgatgtccatgatcaccagatcgggacatagctgcgtggcagcctgtacggcgctcgcgccgtcggaggccacgcgggccgtccatccttccgcggtaatgcgctgcgcgatggcagtggccaacgttggttcatcctcgaccaccaaaacggtacgtggggtggccgaaggtcgtgctgatgtgttgagcatagcgatccgcctttctcagagttctggcttcaagaatactgcgcccaaagccggaacggtgatggttgcggaccaatcgcgcgaatggtattcgccttcgaccgcttcgaacgtgccgttatggatgtcggatccgccgtaaatcttgtcgtcggtggtcagcacctcggtccacttgccacccttggtgagcggcacctggtaatcctgccaggcttcgccggagaagttcacgacgacgaccatctgctcgccatccttgccgattcgcacaaagcttaacgtattgtggtcggcatcatcgctggtgagccactggaagccggccggatcgaaatcctggctccacagtgcaggcgattccttatagagcgcattgagatcggcgacgagcttcttcacgccgcgatgatcgggccaattgagtgcatcccaatccacggagccgtcatggtcccactcgccatactgggccacctcgttgcccatgaaggacaggttcttgcccggatgggcccactggtaggcgaacagggcgcgcacaccggcataacgttgccagtcgttgcctggcatcttgccgaataccgaacccttgccgtatacgacctcgtcatggctgatgggcagcacataatgctcggaatacgcgtagaccatggagaaggtgatctcgttatgatgccacttgcggttgatgggctcctcgtgcagatactgcagggtgtcatgcatccagcccatattccacttgaggccgaagccgaggcctccggcatcggtcggtgcggtgatgccggggtatgcggtggattcttcggcgatcatcatgatgccgggattgttcttatatgcggtggcgttggcttccttgaggaaatcgatggcctcaaggttttcgcggccgccgtagatgttcggatgccactggcccggctcacggctgtaatcgaggtacagcatcgacgagaccgcgtccacgcgcagcgcgtcgacatgatactcgtccagccagaagcaggcgttggccaccaggaagttgcgcacttcgcggcgcccgaaattgaacacataggtgccccagtccgggtgctcgccacgcatcggatccggatcttcatacaacggggtaccgtcgaaacggcccaatgcgaacgcatccttcgggaagtgggccggaacccaatccatgattacgccgatgccggcctcatggagtttgtcgaccagatatttgaagtcgtccgggccgccgagtctggagtcgaccgcgtaatagccagtgacctgatagccccaggagccggagaacgggtgctcggccagcggcatgaactccacatgggtgaagccctcttcggccacgtacggtacgagtttgtcggccaactcgcggtagttgtgcacatccttgcgccagctgcccgcgtgcacctcatagatgctgacagggccgttgtgcggatcggtgacggcgcgcttggccatccacgcctcatcatgccattcatgttcggagtcgaccacgacggagccggtacgcggcggaatctcatgcgagcgctccatcgggtcggccttcattgtccactcgttgttggcgttgagaatctcgtacttgtagatctcaccgtcgccgacacctggcacgaacaattcccagacgcctgaggaacccagctcgcgcatggcgtgcgtacggccgttccaaccgttgaagtcgccgaccacgcgtacggcatgcgcattcggagcccatacggtgaatgcggtgccgaccacctgttcgccgggcgtaccatccgcggaacccatgggatcgtcgtagcgcagcacatgcgcgccgagagcctcccacaaccgttcgtgacggccttcgccgaacaggtacatatccatgtcgccgatggtgggcaggtaacggtacggatcgtcggacaccaccacggtaccgtcttcgtattcggtgcggatgcggtagtccggcacaccatagctgtcatcgttccgaatcgccttgacgagggctatgaacacgccattgaattcatgaaccgcctcggtctcggcgttctgcgtgatgatcgtcacggatttcgccagcggacgcaacacgcggatcgtgacgacatcctcgtgcttgtcggactcgagatgcccgccgagcacctcatgcggattgtaaaacgtaccgttgcttactgcatccaggtcgccctgagcaacaggaacggcaacgacatcttctttgatcttggattctgtagccatggcaaaagtgtaagcacgattggtcgaaaaatggcttcgtgtcgcgctttattttcattttttcgctggtttttggacaagtccatgccgggtggcacaataattcgggttttgtgtaagcttttcacggaggattcatgggttacaaggtcggcgacatggtcgtctatccacgtcacggcgctgcgaaggtggaggccataaccgagcggacggtcaagggggtcacccgtgaatacctgcagctgtcggtattgtcgtctgacggtttggtcatcaatgttccggtggacaacgccaaaaaagtcggcgtgcgcgacatcgtcgatgccaacgaggtggcgaaggtctttgagatcctgcgcactccgatcatcgaaaaggaaatgaactggtcccgtcgttacaagctgaacgtcgagaagatcgccaccggtgacgtcaacaagatcgccgaagtggtgcgtgatctggcgcagcgggacgtggatgagcatggtctgtccgccggtgagaagcgtatgcttacgaaagcccgtagcatcctcacctccgagatctcattatctgagcatctcgaggaaggcgaggcccaacgcctgcttgacgtgaatctggggtacgaagctccgcagccaggagacgaccagcatcacaccgaagccccgcaggaggccgcgatggatacgttggcccgtgttgaggccgaaggcaagaagtccaagaagaagtaaggcatctctgatgcgcatcggtcaaggtttcgacgcccatcgattcgctgattccaatgcaggcaggccgttatggcttgcctgtttgcattgggagggtgatggcatagcaggtgattccgatggtgacgtcgtcgcacatgcgctgatcgacgcattgctggcagccgcgcaccttggtgatatcggaacgttgttcggcgtgggcgaaaattccgacggtgccggcaaacatggtgccgaaatgctgcgtaccgctgtcggctatctgaaggaccatggtatgcggccgataagtgccagcgtggtaatcatcgccaatcgcccgaagatcggcacgcgtcgcatggaggcggaagcggcgttgtctgcagcgatcggttgcgaggtgtcggtgacggccaccactacggatggcatgggattcaccggttcgggggagggcgtagccgccatcgccaacgcccttgtggaaccggtggagtagggctatcttctattcagcgcacccactgccttggtaatggcccagaacaaggtggagatggtcacgatgatgaagctcgggggagctgggaacatcgcggacaggatcaagccgccccagatggagaccaggcagatcgcactggcgatgaccatcgctttgaacggcgaacccgcgagaatgttcgcggtcgcggcaggggtgatgaccaatgcgaaaatcagcaacgtacccacggcgggcacggcgatggtaatcacgccggccatgatcgccatgaacgcgatgttcatcaggccgacgggcacgcccttggcctgagccacctgctcatccaatgagctgaacagcagtggacggtagatgagcgccaacaccgccaacagcacgatgtcgaagacggcgaagccgatgatctggccggtggtgatggtcagaatcgatccgaatagaatcgactgcatctgttgcgaggcggaacttgagagtctggcaaaaaacagacccatgccagtggcgaaggccaacacagtgccggtggcgatttcgcgttgcgacgccttcttgccgagggctccgatgaccaaagccccgccgagagcgaatatccccatgccgacggagaccggcagtccaatcaatatcgcaccggtggctccgggcagtccgatatgcgccaaggcgtgcgaagcgaatgtggaatggcgtgcgatggtgaagtatcccatcacacccgcagccagggcgatgcacaatccggcgagaaatgcgttggccatgaatggtgccgtcagcgtcgacatccagtccgggtcgaatgcgaatgcggtgtggctcatgcgtgttgcctctttccggtgtgctggtggaattgcgcgacctctttgggatcgtgtgcgtcgacgattgcattcctaggttcgtcgtcgctgggtgtcacgaacatgtctccctgcggcgtggtgaccacctgcacggtggtgccgtacaagtgggtgagcagttccgagtccaatacctcgttcatgcgtgcataatgcgggtgtccgtcaagcagatacacggcaccggtaagaatcggcaacagcatgttgaggtcatgggcgaccacctgaatggtcatgccgagttctcgattgagtttggcaagtacatgcacggtggctcgctggctggccagatcgaggttggcgagcggctcgtcgagcatcagtagctgcgggtcgctcaccaatgcctgggcgatggccgcacgttggcgcaatccacccgacaattcggaaagccggtatgaggccttgtcgagaagaccgacgaattccatggctttgcgggccttctcacgttgggcgcgcgtgacgggatgaatgccgaaacgagtgccggtcaagccaagcaataccgattgttcggcggtgagattcgactcgatgtcgacggcatagctttgcggtacgtagccgatgtgctgattcatggcaccggccggtttgccgagcaccgtgatgctgccggccgtggtatcgatcagaccaagttcggccttcatcatcgtggtcttgcctgcgccgttggtgcccacgatggcggtgaccgaaccgctgggaatgctgaatgagccatgcctccagatcacacgtccgccacgtttgacgcaggcatccttgaatacaatcgcggcttgcggtgcctgcccgtcgggagagtcggtgccatcgtgcatgaaaagctcctttatgatgtcgtttccgttcgtatcatgacaaacagtgttgacaaccattctcaataagagggggtgtttcccgtaatgatcgcgggaagcaccatccttaaggcgagccttggaatgcgtctgcggcgttatttgccgggatccggctgcggctcctccgtcgcattttcggatggcgaggccgattcggatgattcgctcggcgatgacgtcgcgttttcggaggaatcgtcttcggcatcggtcgtcgccatcgtttccgtcagggatgtgaccagcgacaggatccaggaggtcaggctcgactgatcggccggcatctgttccgtgacgtcgaataccggaacgtcggacttctgcgcggtgccggtcagcagattcgtggcatcgctggcttcctgcacgttgttgaccagcaggtcgacctgatgcttttccagcaattcctggaaggcctgtagatcagccggcgccggttccgcgtcggaggcggccgattgcgcatatccttcgggggtcttgtcatcaaagcccatatcgctcagcagatagtatgcgaccgcttcggtggccgcatatgtggcgcctttatgcgtgctactgaaggttttcatcgccttctcgaccttgctctcccgtttgttccacgcggaaagcttgcctgcgaagtatttcttccgtgccggcatgatgcggctgtaggtgtcggccagctccttggccatggcgttgcgggcgtcgttggagaaccacaggtgaggattgtccccctccatggctccgaccatttgcgccgcggatacgctgacggtgcccttcgtcagattcttcgtggcccaggcgtcatagccggctccgttggagacgacgacctgtgccttctgaagagcggcgacatcggcggtcttgggctcgaaatcatgggcgtccacggaggtcgagttcagaatggaagtcaccttcacataggttccgccgatctgctccgcaagggagccccattgattgaccgatgcgactacggtgatgggggaggtctgctcgctcgtcgaagccgaagcggtcggtcgctcgtccggcgaatcgtggccgaagcaggcggtggcgccgaacaccatgcacatgacgatgccggcggcaacggtacgtaggagggaacgctgatgcagacgcatgctggaatgccttcttcctaaaatcatcccggtcgtgttcgtctcgcgaacgtgcgcacgacttccgactgaaaccaagatagcctacgatacatgcaaacgccaataggccaaggtcatctatacgaagggaacgcccgtatggcaacgaaaatcgacggcaagatgatatccgcacgcatcaaggaggaccttgctcggcgggtcgccgcattgaagcagcggggcgtcgaaccgggattagggaccattctggtcggttccgacccgggttcggtcaaatacgtcgccggcaagcatgccgactgcgccgagatcggcgtgacgtccatcaagcgcgaattgcctgcggatgccaccttcgatcagattgcggcggcggtgaatgaactgaacgccgaccccgcctgcaccggctacatcgtgcagttgccgttgccgaaaggcattgacgaaaacgccgtcatcgacctgatcgatccgaaaaaggacgcggacggcatgcatccctacaatctgggcgagctggtgttgcatccccgtggcgagatcgccacgccgttgccgtgcacgccacgtggcgtcatcgaactgcttggagcctatgacatcgatctgaatggcaaggaggtatgcgtgcttgggcgcggcatcaccatcggccgcaccattggactgatgctcacgcgcaaggaagtcaatgccacggtcacgctatgccataccggtaccaaggacgtgcgagaccacatgcgtcgcgccgatgtgatcgtggccgcgatgggttccgccgcgttcgtcaaaccggacgacatcagggaaggggcggtgcttgtcgatgttggcgtctcccgagtattcgatgaggaggccggccgttaccgtgtcaggggtgatatcgacaaagcctgttacgagaaggcctcggcctatacgccgaatccagggggagtgggtccgatgacccgtgccatgctgctggagaacgtggtcgaaatggccgaacgccggcactgagagagcaagccgattatttcgggcgtgtcgcgtgaagattccgctcgtttttgtgcacggtctcctgtagacttaagctttgtgtgtgctgtacgcgcacccggtataactgaagaacgattttatccatccactatttgtaagaaaccaaattaatggcagagaacaataacgaagtcgccaaggtcgccatcaacgacatcggcaccgaagaggacttcatcaaggcagtcgattccaccatcaagaacttcgatgatggtgatctggtcgaaggtaccgtcgtcaaggtcgatcacgacgaggtgctgctcgacatcggctacaagaccgagggcgtcattccctcccgtgagctttccatcaagaaggacgttgatcctgacgaagtcgtcgaggtcggcgacaccatcgaggctcttgtcgtcaccaaggaagacaaggaaggccgtctgatcctgtccaaaaagcgtgcacagtacgagcgcgcctggggcgatatcgagaagatcaaggaagccgatggcgttgtcgaaggtaccgtcatcgaagccgtcaagggcggccttatcgtcgacatcggcctgcgtggcttcctgccggcatcgctggtcgaaatgcgtcgcgtgcgcgacctgtccccgtacattggccagaagatcaaggccaagattctcgagctcgacaagaaccgcaacaacgtggtcctttcccgtcgtcagtacctcgaagagacccagtccgaagtgcgtgagaccttcctgtctcagctcaagaagggccagattcgtgaaggcgtcgtgtcctccatcgtcaacttcggcgcattcgtcgatctgggcggcgttgacggcctgattcacgtttccgagctgtcctggaagcacatcgaccacccgtccgaagtcgtcaaggtcggcgataaggtcaccgtcgaggtgctcgacgtcgatctcgaccgtgagcgcatctccctgtccctcaaggccacccaggaagatccgtggcagcgcttcgctcgcacccacgttcctggccagatcgtcaagggcaaggtcaccaagatcgttcagttcggtgtcttcatctccgtcgaagacggcatcgaaggcctcgtgcacatctccgagctggccaaccgccacgtggagaacccggagaccgtcgtcaagccgggcgaagaggtcttcgtcaaggtgatcgacgtcgatcttgatcgtcgccgcatctccctgtccctcaagcaggccaacgactccgtcgatccggcttccgaggacttcgatccggctctgtacggcatgccggcagagtacgacgagcagggcaactacaagtatccggaaggcttcgacccggcaaccaacgagtggatcgctggttacgagaagcagcgtgaggagtgggaggcccagtacgcggcagcccacgacctgtgggagcagcacaaggagttcgtcgccaaggaactcgagaacgcagccgcttccgccgccgaggacggccaggctccgaaggaagagaaggtcgaagaggtgtccaactactcctccgagaacacttccgccggtacccttgccgactccgaccagctcgccgctctgcgcgaccagctgctcggcaagtgattggcctgtgctgacgggcaaccgttaggcagatgacttcaaaccccgcacctatgtggtgcggggtttttcgttgccatatcttcttcctgtcactccgatggatatcatgcataccttccatcgccgtgagcggagcatgttgggccccccggagcattgcaccgccttgccggtgtccgttcgactcggcacaatgacagatgtgacgattcgaattggtctgaccggcggcatcgcagccggcaaaagtacggtatccgcccatctgtgcgatcttggtgcgttcgtcatcgattatgacgagctggctcgtgaggtggttgccccgggaagcgaggggctgcgtcgaatcgttgattctttcggtgcggatgcgctggatgagcggggcgagctgaatcgtgcgtggatggcggaacaagtgttttcaggccaggcttcggcggggatgcggaaacggctcgacgacatcgaacatccgctgatctatcaattggcgttgcgcagggagcgtgagacaatggcggcgaacccgcaggccgtgatcgtgcatgatgttccgctgttggctgaggtcatcgacgacatgccggtgcgtttcgaccatatcgtcaccgtcgaggcgccggaggatatgcgtgtgagacggatgatggcgacccggaacatgagcgaggaacaggcctgggcgcgtgtcggccatcaatcctcggcacgggaacgcatggccatcgccgatgtggtcatcgacgccacacataatatagaacgtatgttcgaagatgttgatagactgtacgcacagtggcgcttggaagcaaggtgatcggcatgggattcgaaatcgaacgtgtagacaaaccgtttgtggtcaaatcaccatatcggccgtcaggagaccagccgaaggccattgaggagctggccacccgtatcgaaaacggtgagaacgatgtggtgcttatgggcgctacgggaaccggcaaaacggctaccaccgcatggctgatcgaacggttgcaacgcccgacgctcatcatcgagccgaacaagacgctcgctgcacagctgtgcgccgagttccgcgagctcatgcccgacaacgcagtgagctatttcgtctcctattacgactactaccagcctgaagcctacattccacagaccgacacctatattgaaaaggactccaacatcaatgacgatgtggagcggctgcgtcatgcggccaccgcgaacctgctgacacggcgtgattgcgtggtcgtggccaccgtctcctgcatctacggcttgggcaccccggaagagtatgccggccgcatgctgtttctcaaggaaggccagcagatagatcgcgacgagctgttgcgcatgttcgtgtcgatgcagtacaagcgtaacgacatcgccttcacccgcggcacctttcgagtgcgtggtgacaccgtcgaaatcattccggtatatgaggaactcgccatctgcatagaatttttcggcgatgaaatcgaccatatctcgaccctgcatcccctgaccggcgacgtgatcgatcacgagccgcaggtgcacatcttcccggcctcgcattatgtggccggacctgaacgcatggagcgtgcactggccaccatcaaggaggaactcgaccaacgtgtggccgaattgcgtaagcagggcaaggaactcgaggcgcagcgcctcaccatgcgcaccacatatgatctggaaatgctcacccaggtgggtgtatgttccggcgtggagaattattcccgtcattttgacgggcgcgaacccggtaccccgccgcacaccctgctcgatttctttcccgacgacttcctgctggtcatcgacgaatcacatgtcaccgtgccgcagatcggtgccatgtacgagggggatgccagcagaaaacgtaccttggtggagcacggcttccgtctgccctccgcaatggacaatcgtccgctcaaatggccggaatttctgcaacgcgtcggccagaccgtatatctgtccgcgacgccgggcgattacgaactgggtctgagcgatggtgtggtggaacagatcatccgtccgacaggccttgttgatccgaagatcgacgtacggcccgtggaagggcagatcgacgatcttctggccgaaatcaaggatcgtgtggccaggaacgaacgtgcgctcgtcaccacgctcaccaagaagatggccgaggaccttaccgattatctgttggaacgcggcatcaaggtcgaatacctgcattccgacgtcgatacgttacgccgggtcgaactgttgcgtgaactacgcgaaggtaagatcgacgtcatcgtcggcatcaatctgttgcgggaaggcctcgatctgccggaggtctcgctggtggcgattctcgatgccgacaaggaaggattcctgcgctcctatcgttcgctgattcagaccatcggccgtgccgcacgaaatgtgtccggcaccgtcatcatgtatgccgatgacgtcaccgaagccatgcacaaggccatcgacgaaaccaaccgtcgccgtgacatccagatcgcctacaacaaggagcatggcatcgatccgaaaccgttgatcaaaaagatcagcgacgtcaacgatatgttggccaaggaggacgtcgatacgcagaccttgctcggcaccggctaccgtaacgccgacaaggcgggcaattcgcatctgggcgtgccgaccttcgacaggagcgaatccgacaagcgccatgaggagatacttaaggccggcctgccggcacaggatctcgccgaccttatccgtcagctctccgaccagatgcatacggcggccgaacaactccaattcgagcttgcggcacgtctgcgtgacgaaatcagggatctgaagaaggagctgcggcagatgaccgaggccggcaaatgatgttcgtccggtcatgtggcttacgtaccatggggaattatggctgaaacccctcttgcattcatgatcgtcacatttgtgacgcttggtatcttcttcatcgtcgatttgttcgtgatcggtcgcaagccacatgtgccctccaccaaggaatgcgtgcagcatatcgcttttttcgtggtcatggcattgattttcggcggattgatgtggtactttgcgggtgccaagccggccattgaattctattcgggctggcttaccgagtactccctaagcatcgataacctgttcgtgttcgtcatcatcatgtcgaatttcgccgtgccgaaacggctgcagaaattcgtgctgtccgttggcatcgccgtcgccctcatactgcgcggttgcttcattctggtcggtgcggccattatctcccgcttcacgtgggtgttctttctgttcggcgcgttccttatcgtcaccgccgtcaaactcgtcgccggagaagaggaggacgaggaataccacgagaacggactgattcgcgcgctgcgcaaggtcatcaggatcaccgatgaatatgacggcgaaaaactgcgtaccgtgaagaacggagtcaagtactggacaccgatgctcatcgtgtttctgaccatcggtaccacggatgtgatgttcgccttcgactcgattccggccatcttcggactgaccaaggacccgttcattgtgttcacctccaatgtgttcgcattgcttggtctgcaacagctgtatttcctgcttggcgagttgctcgacaagctggtctatctgccgcttggtctgtccgtcgtgctcggcttcatcggcgtgaagctcatcatggaggccatgcacggcaattccctgccgttcgtcaacggcggaaggcccgttcactgggttccggaagtgccgacatggctgtccttggccgtgatcgtcgtggctataggaggttccgcgctggccagtgtgctgaagatgcgatccgtggaggccaacgcccggtgactggtcggtgaacggcatgaaaactgaggttttcgttctcccgacaaaaatgtgagcgctcacaacacacctctgtccggagtggaagtgagcgctttttgctagtaaactatgccattggaaacagggtcgtcagatccaaatcaaattagaacaggaataggcaggcatacatgcgtaaagccaagatcgtagataccatcggtcccgctaccgagtctctggaaggcatcaccagcctcgtcgaagcaggtatggacgttgctcgtctgaaccgctcccatggcactcctgaagaccacctgaaggtctacaacaaccttcgtgcagccgccaaggccaccggtcgcaatgttgccgcactggtcgatctgcagggcccgaagattcgttgcggttggttcaagaagaacgccgaaggcgaagacaaggttcagctgaccgaaggccaggagttcgtcatcaccaccgatgacatcgaaggcgacgagcacatcacctccaccaccttcaagggtctgccgggcgattgccacgccggcgatccgattctgatcgatgacggcaaggtccgtctcgaggtcaccaaggtcgagggcaacaacgtgtacaccaaggtcgttgtggccggaccggtttccagccacaagggcatcaatctgccgggtgtcgccgtgtctctgccggcactgaccgaaaaggatgaggccgatctgcgttgggccatccagaccggtgccgacatcatcgccatgtccttcgtgcgtttcgccaccgacatcgatcgtgcccatgagatcatggacgaggaaggacgccgcattccggtcgtcgccaagatcgaaaagccgcaggctcttgagaacctcgaagagatcgtcaaggccttcgacggcatcatggtcgcccgtggtgatatggccgtcgagtgcccgctcgaagaggtcccgctggctaccaagcgttgcatcgagctcgcacgccagtatgccaagccggtcatcgtggccaccgaggtcctcggctccatggtcaactccccggtcccgacccgtgcagaggcctccgactgcgccaacgccattctggacggcgccgacgccaccatgacctccaacgagaccgccgtcggcaagtatccggcggtcaccgtgaacaccatgagccgtatttcctccttcgccaccgaacacggtttcgaccgtatcccggagctgaagaacctggacatgtcctccaccggcgcagtgtcctccgctgccgtcgatctggccgacaagctcaacgccaaggccattgttgcctacacccagaccggctccaccgtgcatcgcgtctcccgcgagcgtccggccaccccgatctacggcatcaccaacaacgagcacacctatcactggctggccctgtcctggggcactgagtccttcctgctcgatgaggattaccatgacaagtcccgcaaggacctgatgatcttcaccgacaagatcctcaaggatgccggcaaggtcgtcgatggcgacaagatcgtcgtgctgagctccgctcagggcgagcaccagccgggccgtaccgactccatctacgtccacaccgtcggtgcctgcgactgagatcggaacagggcgactgactaattgacatcagaggagctcctaccaggatgtggtaggagctcctctgatgtctgtgccgggttcttgggcgatggcgtatgctacggggcgtgcatggacgttattcgttcaatccttcggccagattgtccggcccgcagtgcagccgcaggatggcgatgatggtcttagcgtcgacaatcgtgccgttgatgaccatgtcgtatgcctcatccaacgaaaagagacgcacttccgcacgtggcgtttccggaccgagcttgctacggtcggacggcgtcagtcctgtggccagaaacagcgccatatgttggttggagaaacttggcgtattgatgaaacgagagaactggctgaaccgttccgcttcgaatcccgcttcttcgcgtagcttgcgtgcggccacatccaatgggcgctcgtcaggggaaagggcatgccccgccggaatttccagcgtccaacggtgggtgggaatgcgatactgttccaccagtggaatttgtccgtcttcggtgacggcaagcacgccaacggtgtctccaccgttctcctgaaccaagtaacgctcgaaatggccgacctcggatgaattgaacgcaacgtgatccacattgaaataatggcttgcgacaatttgtttgcggacttcctctttgaccggggcggtgcgccatggatcgaagcgacgataggtctcattgctcatatgtgccctccttacaggggatgtgcaatcacttgccattgtaagccgaaagcgatcgataacgcagagggcgaaaacgtgttccgcgacgtggtcgaccggatgaatcgtggtgagaaggttcgcgacaccgccgaaggttttgcaaaatccccttcatgtggtatagttccataactgtgcgcaagcccctgtatcccaattggtagaggaagcagcctcaaaatctgcgcagtgtgggttcgagtcccaccgggggcacccaaaacgggatctcgcggagaagcgggaacccatggccccggggccgattagatcggcgtccaggggagccatcacgaacgcgcgaggtccgacggccccgtgcgttttgttttcttcgcctccttccggttgcctgtagtatcgtgccatacccgcaccagctgaggcgctgccggaggcgctagcaagctcatgttgagaattatcacttggcgcatcatgcgccaagtgataatcccgataggcaggctcctcgaagagatagtctttgagagccgtcggagagacgagaacgtagaacggcagactgaagtacgtggccgcatttgcgatatccgcagaagtccattcagctttgttgttcagcttgcgactgactgatgcttgggcgagacctaaagcggcagcaaaatcgctttgacttttctcggggaatcgggctagcagcattcttatgttgttacggacgattctctgcatatcttgcgcagcttgtgtttgattattttctttcttttgcatgcaatcaattctaaacacaccaatttgatattttgactgaagctgttattgttatacgcatgacgtataaaacactttcacatcgtattgaatttctgaggagagaacggcacctgaatcaagctgagttcggaagactcctaggcataacccaggcgacagcatcgcggaaactgaatggtcagataccgttcagtactgatgaggtacttcgctgtgcgattgtctttggcgtgtctacggaagccttgtatggccgagaagaccttgaagatctcaaacagcctgtctagcgagcgagaacagagaaggagaagaaaattgcgaaccaaggaaaaactgtggctgcaggcccgtgttacggattcggaacccacgaacggggaactggtcggactgacgatcctcgacctcgacacgggatacccgaaagtcgaccacgcgatcttcaaaccactgaaaccaacgacacactgggacgaacgcctcaccgggggaatcaccaaggaagacgccgggatccacctgccgttcagcttctaccagccggaaatccaacacatgatggaccaggcggaaggattcgaaggaccgaacatcgtccgggacctcggattcctccaggcgcaaggcatcagactccccgtgaccgcatggatcagacggaccgagcaggagccacgacggagacgcacacgacacaactgaacaggcaacagacgtccgtgaacgaattgcagttcgcaacgggcgatgaaccagatccaaccaacaaccagcagacgaaaggaggacggcatgacacggccacgacaatcacaagacgcggcaggcatgacggtagccattcaccgcggccaccacatcacgcatatacgcgaagccggcctcctcgaacagggaggggagcaacagacgctccaacaaggccacgtccgtacgctccgattccgtcaaaccgtatccggcggcatcaaaaccgggatgatgctcctgtacgacacgaagccagcaatcataggcgcgtgcggcccgctcgaccggaggaacggagcccaagggatcatcgaacacgacggccgcgacggcataccacatcccgcaagaggaacgatcctcaagaagaccgacggtgcgggcagacggccatccgccggacacacgccacccggaatcctcacacatcagcctcaccatccagaacgaacttcgatatcactccaaccaccgaacgcggagccgataacgaaccgatagaaaagcccgcacacgagttgcagctcacatgcgggcgatgaaccagatccaaataaccactttcaatctccaggtaaccagccgagagaccgaatccaatcaagagaaaggaggtacaggccgaagacaggaacaaagcccgatcatcagacatccagaccacccaaccgtgatggaggggttcggttcagataccaaccccaaggaaaccaacacaaccatcaatccacaaggggttaatgccgatcaatccctagaaaaggagtcaataccatgactgattatttcacactcgacaacgatgacgccacccgatatccggaatccacgcaaaacgaaaacgaattccggaccgtgatcgacgcggaggtcgtggacgccgacgagatcctggacgacgcgcccggtctcgacgcgcccgaacccatccgcctcattgacgagcccatggaagacgacacggacgaagtggacgacaatcccgtcgccgcattggccgacacatttcccgtccaggtcaagcccctggccgcgggcgagagcgcgttcaacgaggaagaggcccgcagaaggaccgaggaactcaaggtcaagctcctgcacgccctcgaagcccaatacgacctcatccaagccgcccagactgcgttcgagggacacatctgggtcgcgctcggctacccgcaaggcatgaagggatgggaagcgtactgcaaggaccatttcacctccgaccagatccgtgtgaccgggcaggcgcgcaccgacctgatcctcggattcgatccgagcaagatcagcaaccgcggcatcgccgcactgctcggagtccatcactcgacggttgatcgtacgatcacgaaagccggccgtgagaagacacgcaagttcgtcggcgcggacggcaaggtctacagcaccgacacgctcaccagcgaggagaccgccgaactcgcatggcggctgaagcaggaaggcaagacccagaacgagatcgcgcaggaactcggcaaaagccagtccaccatcggcaccgcgatcagccgcgaacgcaactgtcgcatgggcgaaagccccgaaccgtcaaggcctgacgacgagactcgcggcatgagtcaaaccccggttcccgacggcgcatatgatcccgtcatcccggccgatccgaggtcgggcgaaaaacaacgcggacggattgtgaacctcatgagggaagcgtaccggcagggcgtcgcgcaggcaatgagccagttcggcatcgaaacctgacgaatactttcgaaatcaccatcatcggaaaggaaagatcctttggaaaccgaacgcatcatggaacgcgtgcgcagactgctcgccctcgccaacgatccggccgcgtccgacaacgagcggcgtatcgccctcgaacaggcacaacggctcatggacgggcacgccatcgagcaatggcagctcgaaaaggaccacgacgacatcgagatcatccgcaagaagatcgacctggaaacgaatccatgcaaccgtttcatggccagcctcgcgtacatcgtggcccgagggaaccgctgccgtgccacctactggttccgcaaggccggaaacggccggagcgtcatcaccggaatcacgctctacggcgtccgctccgacgtcgacaagaccgaggcgatctggaccgccatggaaaccagccgcgccgtcatgtggcgggaacgcgccaggacgacacgcaacgcgaaagcgaacgccgcctggaggaacggctactaccagggcttccaggaggagatcgcccaccggtacgggatcctccgccgggaaatggaatcggacgacacgggcagggaactggtcgccgtccgctccgaccatgtcgacgcgtggatcgaagccaacgtcgcattcgccgccgagcatccgaagctggccaggaccgcccgggccagccgcgccgcctaccggcatggccgcgaggacggatcacgccaggcgatcggcctgagggaaaccggcgggacaggccagcggaccctgcaggcaagacggaaccagtgaagggaaacgacacatgtattgggatcgctacatcaaccgaaataatccacgtcgcatcggaccactcgacaagccgctcgacacgtacgtgatgcttgacacggaaaccacgggactccatcccggggaaggagccacgatcatcgagatcggcgcattgctcgtgacgccgggcaacgagaacgcaaggccgaggttcgagcagctggtcgacccgcaacgtccattgccggaattcatcagccgactcaccggcatcggcgacggcatgcttcggggcgagcccaccgccgatgccgcgatgctgcgcttccatcaatggctcgacgacgtctggccggccggcaggccgttgaccgtcatcgcccgcaacgccgaattcgacatcggcttccttgacgcggccgaacgctcctatgatccgtccgcatcggagctcgactgccgttggctgtgcacgaaggagatgagctgggaactcaacccgcagaaacgccatcaccgcgtcagcgacctgatcgtcgactaccgcatcggggacgtcgaggagcatcgcgcgctgtccgacgcgatccaggagcagatgatctaccgggccctgtgccgggaagcgagcatgcgagggagatggggacgggaacgagtctcatgacgggttgactcaaatggttggcgtcatgcgtgccggcgcagcgaacctgatagtctgaagacatgtattcatcggggtccccgcccgggtcctttgaatatggggttgtttcaggggagggttccatcctcccctgaaatgtttttcacgggcctcatcccgatactggtccattgccgaggggagcgaagaggcaacctcaaacggccgatcgcaggaaggatcacaggatcaagacccgcaagccacggcatcccgaccggaaacagcttgcggacgatgatatcagcgaggattgaagtggagtgaatgagcccgtcaaaagcgatgggccatccacgaggaaaggatccatcatggcaaccatcaaccagattcccatgaccatcatgggcaatctcgtatccggcctcgaacccaagcgcacgtcgggcggcaaaaccgtcgtcaacttccgggtcgcgcagaccagcagcaccgagaggaacggcaaatgggaggatggcgcgaccacgttcatccgatgcgtggcgtacggtccgatcgccgagcacatgaccgagtccgggatgggcaagggcacaagggtcgtcgtcacgggacgatacgtgcagcgtgactatcagaccgaggtgggggagagacgcagcgtctacgaactcgttgcggacgatatcggggcgtcggtacgatacgcgaccgtccggatcaccaaggtcaatggaaacgcacagcggtccgtaccggtccaacaacagccgatgcagacggatccgtggccggccacgacccaggatcggttcgcggaaccgcaggaaccgagcctctgaatcaggaagccgagaatcgagcccatgacgtgtcccgaaacgtcatgggctcgaatcgtccgtggactcatcgcggagacaccgaccgtttacgggcccttggtggatctgaccgatatcgaatcgatggacccgtgcgacccgggtcattcggatcgtgggctaaaaccagcgaagcaatgtgaaccgaaccgatatcggaccggtcgaacgtgacccgtcctcccggatcgatcgatatcgatgtccgatagggtcaaaaccacgggtcaaaagacccgggtcagaatttgacccggtacgaccggggagggtcaaaaacggatgggcccggagaaaacggcccgattccaacgattcagtccgacgggtcaaatgaccctccggcggtccaagccgatccggccccggatcccgtgacgccgatatcggctcatggcagggtcaaatggcccgcagacggccgggtcaaaaagccggatcagaatcgacccgatagccgggctagggtcaaaacgtcgccgcatgccacgcagaggattaccgcctcatctcgaggcaatgatgttttggcccttctcgtgtgccgcatccggaacggtcgaaagacgggaggggcccgatccgttcatgggccttccggaccggtccgggccacacgggtgaaccgataccggcccctgacccgatatcggcgggacgacgatccttcacatgggtcaaaacccgcggaccgggaccggacatgatccgcgccgaaaccatgcacccagggtgccccttcctcccggaacccggaaccagaccatcccgaaaccagtagaaccgaaaaaaccagacccaacgaaaccaggacaaggaaaacacagaaagacagaccaagcagaaagaaccagaaaaaacaagcacccacaccacaaccaagccagaaaaaccagaagaccagaaaaagaccccgaaaccaacaaaccagaaaacccaacatcaccaaacgacaaccatgcgcgtcttgcacccaccccgttgggggacgccgagaacggcgtcattcgtaggtcgtgtgacgtgtttagatgggttttcgcccgatatcgcgacaaaccgtatgggaatccgcgtgggatgggcatggatggcagtgaaaaaccgcccgtgtgcgaggcctgcggcaggcccgtgacggagcgcagcaaggtgaacggggcatggctgaagagccatcgagggtgcaaggaccggatccggaccatcaggcgcaggcgcgcggccgaggagaacgaggaacgtgtcgaggccatgttcctcgaagcgttggaggaccgcaaacgggtcgcgaaccagtggcggtggcagatcgagaaccgcaacgagctcgcggacgagcacgaccgggtcctggccgccacgctgctcgtgtcgtaccggtgcatgatcgccgccatgaacgtcatgccgtccgcgctcatccaatatcgggagctatgggccgtggacctgacccggatgctgggccgacggacagtggcgctcatcgcccgacgtgacggctggacccacaccgcattctgggagcatgatcccgaatgcagcgaggacggcacgctgacccgcgtgggcgccggggaatgggccctgccgatggagggcatggaggacgagtaccgcgacgatctggatcatgaggacggtcggggtcggcggacgttctcggacgtcaaggcgctgcagcggctatgggccgaggaccatgccggcggccaatgggatccgggcccgtggcggttcaagtgacgacacggcaaggacccggattcgaaaggaggacagatggcggtacatcggatagacgggatctgcagacattgcgggaagcatacgcaggtatgggaggacggatactgttcgggcaaatgccgtcgcggcgcgtggcgtgccggcgaggggaccatcgcgggcgtatgcgaggtgtgcggcaggcccgtgtgcaagcccaggaggggacccgtgccgcgatactgcagccgccgatgccagcagcgacggtaccgtgagaaaaggaacgtgcgggaggccggccggcagcgggccggcatggagcatctccaacggctgaagaaggagacgaaggacctcaggacacgcatcagggcatgcaaggaacacgaaaggatcctgggcgaacaggccgacaggctcaaacagacgttccgcgacaatgcggacctcctgctcagactggccgcaacgtcggacagggacctgatcgacgacgcgcccaagggaggctacatcgacgaactgcgcaaagaggaaacgacatggcaatgaacctcaccaaactcgcgaacgcggaatacacgctgcacgacatcatggaggcactcgacgcggacggggctacggtcggcacgggaccaagcggatactacaccgcgaagggcaacccgcccggacggtggataggctccggcgccgaactcctgggaggctccgtcggacggacggcatcgtcgaaaacggtccgcagcctcatcaacgacagccgtgacccgtcaacgggaaggttcctgggcgacgtgaaactcaccaagggcgacgacggcgaaccgccggtcgccggctgggactacaccaccagacagccgaaaagcgtcagcatcctatgggcgttcggcgacgcggaaacacgcaggggcatcgacgaatgcctccagaaagccacggacatgaccatcgcctacctcgaagacgaatacgcttcgacgcgggcggggcaaggaggggtcgcatccgtggcatgcgacggcgtcgccggattcgtgttcgaccatttcgacacccgtgacggcgacccgcaaccacacaagcacatcaccatatccaaccgcgtgcgcagaagctccgacggggtatggactgcgctcgacggcaggaaactgtactccagcatggtcgagatctccgaaatccacgagaacctcctccaggacctgctcacccaacgattcggatggacctggaccaccaaggtcaacgaacagggaaccaaatccgtcatcaacgaggtggacggggtacccgccgaactcatcgaggcattcagcggccgtcacagcgagatcacgaaacaggtcgagcagcgggtccaacaggaagaggcccagaccggacggcccgtcagcttccaacgacgcgcgcagatcgacctggaagtatggcaggccaccaggaaggcgaaaccggaaatccaacccagcctcgcggaaaaacaacggcactggtggaagaaactcgggcagacggcgcccgacatcgacatccggcacgtgtgggacaccgtcaactcccgcaagaccagcatgctgcacatcgactccacctgccaggaggacatcagccggctcctgctcgaccagatcgccgacatgagccgaacgggcaagaacggcctccaactcgaacgggaactcgtcgacctgtcctaccgcaacgtatccaaaggccggaccacatggaagaagaccaacgtgagggccgaagccgaacgactcctcagaagcgtccgcatcgaccccgaacagcggatcatcgtcgccaaccggatcgcggacctcgccctcgcacgatgcgtcaaactcacacccggcagataccggatcccgcaggacgccaaggacagtcccaccctcaccaacggcaacggcgtaagcgtgttcgacgacgacaagctcgacctatacaccagccaggagatcctcgacgccgaacattatatgatcggacaggccgggaagccggccgtcaccggattcaccgcggacgaggcccgcatatggctgcaaggatggaacgagcaggccaggcggaacggaggatacccgctggccgccgaccagttcgaagccgccgtctacgcattgtccaatcccaggatggtcggcgcggtcatcggaccggcaggcacgggaaagacgaccaccatgcacgtggtggcggacgcatggcgcgccaaatacggtcccgacagcgtcctgggactggcgaccagccgcagggccgtcggcgaactgaggaacagcatcggatgcaacagcatcaccatcgccaaactcctctaccacaacgacatcgaccagatcgagcgacaccgacgcgacatcgccgtgctcgaccagcagatccggtcgacgcccgacccggtccaaagactcgcctgccgcatgcggctgagccgaatcctcgccgaggaaagcacctactccatccggccgaaccagctcgtgatcatcgacgaggccggcatggtcgacaccaggcacatggcccaggtatcaagaatggccgaactcatgggagccaaagtcaccctgaccggagacccgctccaactcgacagcgtctccggagccggcggcatgctcggctggatggaacggcacggcatgtatcagatgctctcaagcctgtggcggttcacctccaaggccgacaaatgggacggggacccccacggcggaagggactccatccgcagatgggagggcgagggacgggcgacgctcgaactcaggaaaggcggcgaccgcgccgatcccgaaagcgtcgcctcatgcgaacggctcgtgcaacggtacgtggaccacgaccggctccactggggagaggacgtgcaattggaggaggagtcctacgtccagtgcatcgaatggcaggaccagggcaaaagcaccctgctcatcgctggcaccagggatcaggtcagggacatcaacagacggttcatcctcgaacgacgttccaaagggcaaagcgaagccgaccccgccaaaaccgtcatgctccgcgacggcctggacgtcggccgaggagaccagatagtgtgcaggaagaacgaagacgacgtcacatcccatgacggccggacgatagaaaacggcatgacgttccgcatcgaaaacgtcggacggcgggacgtctcatgcgtaagcctggccgacggcagccgttgggagatcccgcgggaattcctcgaaacgggatgcgaagccggatacgcctgcaccgtacaccgctgccagggcatgaccgtggaccgttgcacggtactgttcccgtccgacgcgaacaccccatgcaacctgcaatacgtcgcaggcagcagaggcaaggaggagaaccacttctactacgcctgcccggacgaggagcaacgcaagatcagacaccaactctccggcgtcgagacggaccccaaggccatcgccatgtcgcgtatgaaagcaagcctgctcaaccatcccgacgccgcgaccgccaccgaaaccctggaacgtgaacggacggaccgcatggacctcaaacggctcatgcgcgaacacgactacgccgccggcctcatctccggcccgcacctcaacgccatgctcgccagacgccacgatcccaaaaccgtcgacaaaatcacccgcagcccaagctacgaatggctccgcggcgtctggtcacgcgcctacatgaccgacgcgaaacgcgccctcgcgatcatcggccagccgctcgaccccgaccgtctcaaaggccgtcggcccgaccgcgaccagctcgtcgggaagatagcgcgaaccgccagggttctgcatcccgaccggatggacgataccacataccgtatcgacatggacgtcagcagggactccgaacaggcacgatacgtcacggagatcctcgaacgcagcgacatcccctacactctcgccgacacgctcgacggcaaggcgatcaccatcgacgtggaccattcctgcatccccgcggtcaagaccatactcgacggcctgtgccagacggtcaagggcttcgaccagagcctgttcccccaatggcgtgaactacgcagggaagagggaaggatcctcaaggagaatcccgacatgagacggcaaagccggcccgtggaacccgactgggccgccaccatcgcgggacggctcaacgccggactgctcgaccgggtgaacggcaccgtccacgaggaatggtgcgccggcgtcatcccgcgcatccgggccagccggcacggcagcgaactcgacatcgtaagacagaacgaacgactcatcgaactgaaagtggacgaactcgtccgcgacgcacaagcctcaaaccagccatggaccggacggatactcgaagcatcggccgacgacccgaccctgttccgcgacgtcgtcgtctaccgggccatgtggcaggtcgacgaggaagatgatccgctgggggagcgaccgcccgcgtcaagcggacggcaggaacagcattgggccaacctcgacgggcggatcaaccacaccgacggcgtcgtcaaccccggcagacggcaccggccatcggcgaaccaggacatgtcggccgttaatcatgcggaggaaacgtcgacgagaccggaagagacaacggcatggcagccatcacgggagcctcccgacaggccgcgtaacgggttgcggatataagccgatgatccggggatgtccacgtcgtccatgccgcgacaccccagccgccagtctccttgtcgagcggatcgtgcaggtgcgaatcggccggcatcggccgcaaagcatgtggaggaggaaaaggacctcgaaaaccggaaaggacggcggacatggcaaccatcaccggattgcgcggatcactcacgcattggctcgtcctggcaagccaatggttccacgattgggacatcacactactggcatcggcgctcatcgtcctcatcgtgatcgccggcgtgaccggtcgggcggctatggttccacgactgtggatgcaactcgtgtgggggaccgtgaccgtcgtcgtcggactgatcgaggttgcgatcatctggaccatcgtcacccgctatctgccggtctgtgacatgggcatcctgatacgaaacatgcttcgacacgaaccaccgacggtgattgcataggttcatccgacgggaccgaccgaacgtttctccgcccgaccgaccacatgcgcacgcctccgcaaaagccgacgatccgacgacccacgcgcggacacgccgatatcggcactagctcctgtttcggacacgaaagaagacacggacggcggaaaagcccacagcggcgggaggcgaagggcaggctcccccacgcatccatatcggggacgaaacgtttgaagggcccgtgaaccccatgacgggacgaatgatcccgtcatggaaggaacgggcacatgaacgacaccgacgatccggataccgatatcgccatcgagatccgtcgcaaggaggcctgcaggaccgccatcgagagcatgggccggatacggcggacgccacggaacatccagctcctgcatgacctggtcgacgaaatcaacgatctcaggcccgaaagcgtgatcggacactacaggatatggccgtccggccaggtcaaccgtctcaccgccggatggaacctgaccggcgaggacgtgaaaggcaagacgcgatacggcggctgggaccccgaacgcgacacatacatgaggatcaacgaggacggcgacttcgagggactcgaccagacgggtgcggaccgactcgtctggaaccatcgggaagacatcatcgccgaagcgtcctggacccccatcggcatggcctgcatcgatcggatcgaacgaatggcgtacctggacgacgatcccatacgcgatgcgccggccaacatgaccatcgaagtcttgaatgggtctttgccgccggccgatcctatgatccaccccgtatcagctcccgtcgattccggactcggcatataggaggggcgggaatggacacgctcatcgaccttaaccgtctgcgtgcggacctcgacgccaaaagacaagcgttcggcgtcagttggaacacgttcgccgggttcgccggtgtcagccccgccatgttcagccggctcaacgccggttcgaccatcaccctcgacacgttcgccaggctctgtgccacatgcggtctcgatcccgccgactacatgcccggtctggacgccgaagacatcagcgacgtcatcgacgtggcgaaaaaccggtccatgacggcgacccgacccaaggagcccgacatggccggcaggctcgaataccacggcatccggttctccctcgacgacctgcgcgagaacatgcgcgccaaatatcggaacgaacggcccagattctattgcgacatgcccgacggaacaccgctcggatacgtcatgacccttccggacggcggctacatcgcacgactcgaagacacgcaggcctggcatgccggcccatacgactccgaaagcgacgcgttcgaaaacctgttccggatgatctcacaatactacgccgtcgacgacccgccagcgcacgcacggggcatcgaaggcccgttcgacgagcggaaggaagcctcaaggctctgcgaaacgcaggccgcggcaacgggggagcgtcccggctggtatgcgtggccggcacgcgacgcggtacggcagaccatggatctcgcggacatgctcgaacgccgatacgccgacaacccgcacgtcaccatcagcatgaacgacaccggaaacccggtgggaaccacggaccccgcccgtgtggaggtcctgataaacatcgacaacggcaccgtcttcaccgcgggggtcgacatggatccgaacgggcgtacgcatccgagcctcatgcgcctcgacggcggcgaaacgacgaaagcggaacctctcgacgatatgcggctcgatgagaaggagaccgtggacctcatcgacgtgagaatctacgaggccggcctgcagggccgtgatccatgggagggcgacccgtgggccgataacctgagccgatccttggagccggtcgaatccgacgccatccagacctccggcgtcgacccgtgggccggcatcggatccggtacgctgccgctgcccgatcccatcgacggtcccggactcgacaggtccgacgatcccggcctcgacatgtaggaggggcggacacgacgacatgcgtttcgaaggcgaacacgaggccggcgagcccatcgccggcacggtagccgtcaggaaggcgacggcgcggaaaagacgccccgaccactgccgggccgggccgattgggatcttcccgtgggcatgaatccatcggcgaggcgtccgacgagttccgggacgccctagaaagggctatgtcgcgccagttgagagagttgctcgactaggatccgcaatgtctgtagtcttcaccagatctaggcacatcaagcccggcgacgaactctcggacttccattgaggcagggaacctcgctcgactcgtggctggtccgtcatgtattcaacacgttagacagggtcaccaccgtcacctacgtggccatggatggtgccggtgtgttggacggcttctacccgttgtctgcgaacagcgtgaactgcatcggcatcggtcagcgtctcgattcggagcgacaccgactgatccgacaagcgaatcgaatatgatgtaacgttacttgatcctcgtgtactccttgacaaggttcatggaacaatacgtggatacacagaagttcatcacacaggtcgctgctggcgccagccgtataaacctctggttgtagaaatcgaggacatcgggatccaggaagcccgcgcacgcatcgaaaaataggttcgatacaagcatcagtacggagcttgcaaagaacagcatccaaatgatggataaccgcagtatgagaatctttttgttctttggatggatgtttctcgagaataagatgaagacccaagaaacaatggtaaataaggcgcctgtcgaataaagcaggccaggaatcttgtcatacatggcaccacctcacttcagttacaggtgatctggcttattgatgtcctagaaggttcaagattgtatggtgttttgagagtgccatacctgacgtggcaaccaaattgttctttcatcatttttgatgcagtcggataggctgtccaatggcgacttgaactaaattgtggaggaatcgttgcccatgccgattcagcataataatagcgcgttggagtggctgcagcagcccaccaagtaggttgcagagatagcgaccacatgccatcgcgtgcgatccaaactcctctagaaaaccattgatttgaccaggaaccgcgtgtaattgcgttatctgtttggatgttagaagatcgctcttcctctgccgatgcaatcagatattgcatcacctcatcttccgtcttcccgtatacgttttgcctcgaatcttgaacccaagagactatttccgatctgtccattcctattttttcatatatcgactgactgtattttatgtcatcggccaatgccgtggttggagtgatgactacgatactaatagctgttactactgcaaaagcggacagaatctgctttttcatatgttcttctttcgttcaggccatccaccttgagggcattaggtgcccctgtaacacctactggttagtgtagataacagaatttccggtagtggtcaagtgataatgtttattaggctaaatccactttttatgttttaattagcaacgcgtctttgcgtcacttcaagtatacctatttttcagcgattacgatagtcctaacgatcttatctgcaaagatccgtcccccgttgtcccataaaggccaaaggaatccgatgaaaggtgacacgaaatcggccaagtgcgctacctctcgtatacccattctcatgccggatatggacagattggaatcctgatcgagtacttgtatcctcaagaggcggtgtgcccaagactgtccattgcgtgtaggccaggaagaaatcacacggacaacgaccgcagaagagcaatcaatccagaaccctatggccccaccgggggaagatcttccgcaaaaaacactacccaccaactgcgatagcaacgaggcaggtaatattatacggagaatataagctactgctctgcgccaccatatgttcactattggcacccccttttttaatactgaccagattaatgccttacctcagttataaatggtcgggattgtgtcatcaattcgatcagcgtgtgttagcgatttgacggcaaacatacccccatggccgcgatcctaaccttacctccataatttctatgatataatcgatataataaatcattatataaatcttatttgatttcttttttatggaggggaccgtcgggcttgcctgcgaccgttaaaaagcctcggccgaccatggggttccagatttcccgggcatgccggattgcatcgtgatccgagtgaatgcacatatgttcacgtcatttgcccctgtttcgggacgcatagagcatggcatgaaccgcactgttcaaacacattggcagacgccagctgaagagcatcaagccgcaaatggagcgactgttcaaattgcgtatacatcattagcaacaacactgaatcaacgagctagggcgtgaacctcaccgttcccgaaaagtacccgatcgactggtcgaacccgaatcttccctcacggaaaaggcaagatagtggacaattgggtgcggctcagttccgaatatgtggatatgctgcgggataatccggtaccggtcgatctcaaggtggtctcggcgctgaaaaagccgatggctattgacatctactggtggttgaccaagcgcgtctacaacctgcacgagccggccatgatcggctggcagcagctctaccaacagttcggctccgattccgagctcaaggacttcaaacggaaattcaaaagggctttaggggatgtgctggaagtctatcaatgcaagatcacggtcggccctgcggtggccgaccccggtggcgttgtcgaacaccagcacgcgggggaccatgccggcatgggagaacaccttgttcaggccatggcacacgcattccgcggtctcgccgggcagcgcggccacgtatctcatgttcgagtacgggaacgagaccaccaggaaatgcacggtccgttccacgcccgcgatcacggccagagcctggccgaaatcgacctgcgcgctgcccggcgcccattccagctcactgaacccctcggcctcgccgcggcggcgttggcgccagcgcttgacccatcgccgcgccgacgagtaactgccctcgaagccgcattcctccacgagccgctcgtgcacgcgccgggcggtgtgccgctgtttgcgcggcatgcgccggtcggcctcgagccattcgtcggccttgcgcgcgtactcgcccgcgaccagggaacggctcgcagttcccccggtcggcggaacgggcgaataatcgcgggtcgcgtacttgaccacggtcgtccgcgaaacgcccggttccctggctatctgcgtatgcgtcaggcctttcgtctcgagctgcctgatactctgttgaatacgcaccggtgtcgtcattcctttcctcccgaggaccatgtgttggttgttagcactcgggaatctatcaggaaccgtacggcaccggcgcttttcttccgccgatgccatttccgtccgtcgtccgtgtccaatatgaacgcttatgtcgttcagatttggtggtgacgccgtacacgtttatttgaccataaacaccggcacgctgccgctgcccgatcccatcgacggtcccggactcgacaggtccgacgatcccggcctcgacatgtaggggcggatatggacgacgacaggcgcatcgaagagaatgcgagaccagcgagcccgatgttgccttggcgggccgttacagcgtgttcgacgaaccacatcatgggatgcaccaacgagaaggatccggatgcggggtcacgcgagagcgacgccgggcagttctccggatacgagatcacggtgcgggatgacaacggcgatccagcatcctacaggctcgactggttcgatgacgaaggcatggcacgtggacgtcgtgccatccgacctgacggataacgctaaaccgaacccgccgatgcctgatccggctggagtctatgacacgaatgattccgcgagagcgaacttcggcatgtgttccaccgacgccttgccccgggaataagaagggaatcatgcgccgttagtgggctcaagcgtcattccaatccgaaatgacgatgtgcgcgcgggaacaacttgatgccgtccaatgcttattgtcggaaagtacgacgaggctgctgaaggcagggcgaggacgttggcatattctttaatcgcctttgtgcgccgacattggcaaatgaagagaacgataaaaactaaatgtgctgaattccttcgtaagatcatggaaagtcgggaaaagaagcgtgccgacaaccccaaggattcctcaggggatactccgaagaaggccatggtcagccaatgatcgcaagatacaggaagggcggccgtcttgcgaagctcaacgagacgtagatcagggaggtgtggcatccgtgcgaatctggatcggcgacgatggattagatagccgagatgatgaatatgggaggcttcgttatttacagatgtctgaagagaaacagggggcatgtaatacagatggaagacgagacatggcaaaaagttcagaccatgaagaagacgtggatatttgaccttcttatcaccttgatcacggtgacagttcttaaaacaccttttccggatggtgcgtatatggcttatagtcgagatgattttgacttggacgggtgttctatcgataggtttggttcgtatggcagatcggaacgaatatgagaagaaacctctcgagataatccgtcaaggtgaaaggaaataagaggagaaaggcaatatccaatgaactattaaggatgtctcgaagcatgtgaacttgcatcttaagtgatcattaatccgtgagtgcaaaatatcagccgtggaattcataatccaacataaaagtgttgacattgcaaacatatcatgtaatactacagttaagaggggtgacggattcaagcacaagatcaaaggagttctcatggatccgctggaacttgatgttcaaggcaaaagcaataatatatcacctcagttcattaccgtcaatgcgttctgcttcaagatttctatgaagatatgtccttctattaaacgatggacatgtaacggatgcacctctacatgcactattttatgcacgacatccgcagagaatgaatgataacgcagaaatgtttaggcatgttcgggatgtaggatctgatgcagactacatggagactatgcttgactggctcgtcgcaaccgcagtaaacgcttcaaagaaagcagagttcatcagtgaagacaatcagtacagcatagcctccggacatgccgggtacgccttgatgctcacgcaattatcaaggaccactaggcgctacggacgcaagagagagacccatgatctccttgatctgtcccagcagcatctactaaaggcagcaaaaaaatggaaaacgtccgattatcgatcttatgggctttttgatggtgtcacaggttatatcttagcccttgacgcttatgatagaacggcagggaatggtaagcagagagcctctcgtttagctcgcaaagtgaaacttgagattatggattctctttcacgacggtcatttggtagcccgtatattcaaccgctttatgacgtgatctccggggcgtcaggtgcattgtcggcatgccaactggtggatcccaccagtggattcgaaaatacggcaccacttaccgccattctcgaaacgcttcctcgaaatcctgcaaataatttttatatttcggaatacttcccttctgaagaactatatcaaaaatatccagatggatacatagattttggggtggctcatggagtagcgggaatcgttcctagattaataaacttatgtgatgattatattttcatgaattcggaactcactcgacaactaagcagatatgtgacttggcttattgaaatgaccctagggcctgccagcgaagggatacatactgtttctgaaaaacccgaaagaaccagcatgaatgacatcaaacctatttctggtatggagggtacgtggtgttatggacagttggctcgcatagctagcatacaagctttaccatgcaccataatcgagccgcgtgcacatcacctaatgaatgagtatcttaaaaaagttttaactactgaaaaactgcagcttatcgcggattccctttatggaagcggaaagcttggtctatgtcacggcctcgcgggatttctactgactttgcgttttcttatcagcaatgtggagcaaatacgtgacggaatccctctatcccaagaatcatcggattttattgccgatcaggtggcaagattgaaacatgatatcccgtataaggatcttatgaccgaagattgccgaaatactggtttcctgaatggcatcataggaaccatatcaagtgtattgtacctatcccgcgatcccattgccgatacgtgtgacgaactcgatgttatgttcttcgggcacaggaggatccgtgaaatcacactataagtttaatggtttgatgcaagtcagaatatgtactcacgatttgaaatcgtataataaaattctgtatgattctaatgttttcgaggatgaaataaaagaatatgtaaattccagcctgcctgccctcgcgcttgaacatgcgtcaaacgatctataccaacaacttgtcctagacgatgataaccaatcaatgaaaaaggttattggtggagcatttaagtatttggatagacatgccaatcgaacaacaccattcggattattcgttgctcatagagcttatagaaatgatttttctcatactaaaagttccgaaccgataatttcgaaaggacaagttcggattgcctacgctccgaagttccacgaactactgcgaatgcaatcgacatgcgatgcctcttaccttatcggattaaatccaactcttgtcatatttggtgatgccttcacatgggtgcatctggtaaaccgaattagtggtgccacgaagaatatgcgtttaaaacgtacccctgtactgtcgatgatcgtcaagtattttaaatctaccagattcgcgagcagaggcgccgtgacggacctcatcacgaatgcccttgatggtgtacggggcaagcggataaagacatttattgactctttattaaacatcggttttttggaagttctcgacaacaacgatacagatgcaaataaaagcctgttcacttctttcccgatagacttaccttatcccgatgaagatacgatatcgccgatacggtcttgtctgcgttcaatacgattaaaagagatgcattgcgagagaaccttagacgctgcgggagagatagttggacatgagtttattgagctggaacttgatcagcagagtgaaatccatctgaaaaaggaggaaatacaaacactggagcaagccataaatgcgatcatatcgacttcaacgctggcctcagacacggtgtggaatcttaccctttggagcaatgagttcgttgaaaaatttgggctgaacaatcctatcccagttacagttgcactcaatccattattaggaatcggaccaccgttcgggtacgggaatccggctccgtcgtcatacgactcgtatcgagcgagcccgtcaaaatggcggcaggaggatttggactttcgactgaagatgattagcgaagcaacgatacatcgaggggtggaatccattgatatttcagatcagcgatttgaacaggatctttttgatctgcagcagagattcgatgtgaacgacatctatccggacttcgatatatcgatgcaggtgagtgaagaaaatcacgagaggagttttcttctccgatccgatacgtgcgctctgggtggacatacctttacgaggaccgaacgtacgatggatgagcatacaagagcatcgtggcaggaaattttaaaccatcttgccaaagatcagggtgttcgatgcgccacagcgctcgaaactcatcctatatccgctacggtagactatcttgtcccggtgtcggcatcattcaaatctgtgacatcaacctatgccagtgatgcaaatattcctttcgattcgctgttcatcattgggactgatcatgggctcgcgctggcacgtcggcgtgatgacacgcacgaattcgaacgaattgtcataaatcatccgagcctggtcattccgcttgcttttacaaacgaagctcgactcattatggatatttcacggacctcatacaaggccatggctggtttcagctgggcgcaattggaaggcatgaaacggcttcctgaggttcgctatggcaatgtggtgttacgtccggctgaatggaccatccctaaacaattgaacgatgcagcaagagaagccatcaagaagcaagactacagtttgttgcgacaagcattgtcacaaatcgggattcacgaagatttcatctacgcttcaggagacaacagactacattttgatactcgctcacaggtatctttagcgatggcagctaaactgttgaaaacagccggaagaaccgatcgcttagaaaaaagcagcattgattactgcaaaggagtggaactagcgtctagcaaggggaaatgtcgcctatcaaccgaaatcatcctctcggtatcccgtcgcatcaaatgcaaggcgaatgtccctgttgagatgtcacttcccataaatacaaacaccattgaagtccgagatgatcgatggatttccataatcttgttggccgtcccggaatttcttgacgagctcataatccacgcagcacatttcacacaaacacaatatatgaaaggtattatcagcacgtggttctatgtgcgttataacgatgacggctgctccgtacgtttaagatggaaagcacaatctggacctgaacagcttatacccaaagtgattgaacttgcgacgcaactacgaaactccgcactgattcgaggctggcagattaccgaatactccccggaaacgcatcgatacgggaaagggaaactccttgacaatatacatgaagccttcaggctatcctccgagcttgcggttaaggaactcaataacaagttatcttacacttcagaagatgatatcgtcgatattggcgatgcccttgagtcgattatcaattatttggacttgcttggtgttcccagtgagctctactgcgacattcttccctctcacgccaagcccaccaccgcggcacgcgaatactggaggaagattagccacagcggtacaaggccacacgacgacgatggacgattcagcctcatatccacaccatcaccctttatgatgatttcccgtttgtcggaaaatcgtagtcaggtggttcggatagttgcggacatgcttcatatgcactgcaataggcttcgctcttcgggcgattcgtttgaagaaagcatgtattggctgttgcgtcgcgacctacacaagaggaggatgacatctgatgggcgatgatcggaatgcgggtagtgagggttcccctgttccctctcccgcgggacggcgggccgcaccgttgggggagtctttccggtgcgcggtccgtatgctttgcggcacgggtgccctgagccttgccggactggtcgtcatgaccgtgatacgcgggcttgtcccgggcgtgcaggtgttcgccgtcagcaccttggtctccagcgtggccgattccgacgggagtcttcacccgcgtggaacaatgtcgctcgcgctgctcgccgccgcgatattgactgcctacgtgctggacaatctgatgaaatacgtgggcgacaggctgacgctacggctttcgtacgacaccgacatgcaggtgaccagcaagctgtgcgctttggaggtccaggatttcgagtcggccgacacgtacgacacgatacagcgcgtcgattcgacgacgggagagcatatcttcggattgttcgacacggcgcgttccgcggtccaggccgtcatcgcgatcttcggcgtggccgcggtggtcgcgtcatggaacgggtggatcgcgctgatcctcctggtcgccccggtcccggcggcggtggccacgttccgtctccaggccagggcctatgacatcgagtacgcgcgggcgccgcagttacggctcgcctcctatttccgcgcgctgctgacctcggacgccgtgcgcaaggagatcaggatcttccgtctggcccgcatgttccaggagagttacgcggggttgaggaaaaggttcctggaccaggacggcgcccttatccgctacaacctgacgcaggcgggcaccctcggactcgtttcggccatggccaacgtggccgtgatcgtattcgcctccatcgttgccgcgggcgggagccgggtcggcgagctcgcgggcttcatatctgcgacgacgcagatgaacgggcttgtgctcgcggcgttcctgggagtgaccgggatctaccagcatctgctgtacgtctcgaactgggtggcgctcatacggatgaagccgagcccgatccgtgaggggaagctcgcccccacggatggcgccggtggggatgctggcacgtcggatgcggtcgcggtcgagttccggcacgtgtccttcacgtatccgggcaccgacaacgaggtgctccatgacgtctccttcacggtgcccgccggcaccacggccgcgctcgtgggccttaacggttcgggaaagacgacggcatgcaaactattgctgcgcttctacgagccgacgggcggacggatcttgatcgacgggatcgacatccgggaatacagccgcgattacctgtacgcccgcttctcggcgctcttccaggatttcgccaggttcgagcgctcgttgggcgacaacgtggccttcggcatgggggaaggcttctccggtggcgggcggacggacgtcgttctcgggagtctggaggcggtcgggctcgggtatctgcccgacgagcttcccgatggtctcgataccgtgctcgggcgtcgtttcgagggcggacggcagctttccatcgggcaatggcagcgcgtggccatggcgcgggcgctttgtaaacgtcccggcctgcttgttctggacgagccgacggcctcggtggatgccgtttccgagaaggcgatgttcgacgccctggccgggctcgatcgcgggatgaccgttcttttggtggcgcatcggttcaccacgatcggtcatgccgagaacatcgtcgttctggaccgggggagcgtcgtggggacgggagaccatgcggcattgcttgagaactgcaaattctacgcggacatgttccacgcccaggaatgctacagccaataaacctccccacgccgacaccatccgctcccgaatgaggagctcgtgcggccgttcggacaccaagctcgagtcatcgcctcaggcatgccgtaccgtccttgttgccatcgttgccgcggctttcatcctcgcaccaagaattaccggtgcacagcatccaattccacgacacgatggccggtcccatccagaaaatgagatgagggagtccacccgatacgacacgtgtcctttgcgaggcaaaggatggaggtgtttttcctgggcacccgcttgttttccgtcccgatgcatgccccttctcgtatatcgcgtcatgttccgcgtcctccttgaggatgggtggtggacacgatcgatgacgctcataggcagcctggtctggtctgccccgcacccgttcgggagtacaacccaagtagagcaattgttccgcatccttcgatggcgtcatgtcaaaggtcacgatacgacatcgtcggtttcccctgcattccgaaacagcgcgcatgctgggtgcgatgatgtccatgccggcgaagatgcccgagggggccagaccgatactccacagcgacataggccggcagtaccagcacgcggcgtggacggggaggctcgagcgggccggcatagtgcagagtatgtcgcggaagggcaactgcatcgacaacggcgcgaccgagcaggtcttcgggcatctgaaggacgagttcttcagaggcaggagatggaccgacttcgagtcgttcaaggcggaccttgatacgtacgtcatccattgggacacgaggcgcaggtaggttaaactgaagggactgaccccgtcaccgaccccaagggcgaactcaaacgcgacaccgaggccccgatgagggcgcgcggctacacagtgcacgcgctcgacctcgtggacttcacacattccgaccggttcaaccccatgcgctacatcgacccagccgaaccccagtcggcgatcctacgcctgaccgacaacctcgtgaccaacgccaccggcgaccgcaaaaacggcgacggcttctgagaagacgccgaaaaggcgctgctgtccaccctgatcgcatgggtcactacaccgaggataaccccacgctcaaccacgtcaccgacatgctcgaccaaatgggagccagcgaacaggacgaggaacgcgagttcatcgtcgatgcccctctttgacgaaacccgcgtcgaaatcgccgccatgcgcgcccacgaggacgactacgacgagcagacgcgcgacatgctcgaaggcctggcattcgcctgcgcccaatacaacacattcctcaaaggcgccggcgaaaccaagaaaagcatcatcatcaccaccggcgtccacctcgcgcccctgcaagtgcgcgaggtgcgccgcatcctctccggcgacgacatccacctggaatccttggacgaaggcaagcgcgtggtctatctggaactgcccgacaccaacgcgacgttcggcttcctggccagcgtgttctaccaatgcctcttcgaaaccctggtcaggaaagccaaccacacggatggcggccgactcggccgcgatgcgcactgcctgctcgacgagttcgccaacatcggcaaaatcccgaactttgtgagactcgtcgccaccatccgctcacgcggcatcagctgctcgatcatcctgcaaaccgtctcccaaggcaaaagcctatacaaagacgactggaaaccatcgccggcaactgcgacagctggctcttcctcggcggtaacgaagcctccaccaccaaaaccatcagcgaccggctcggcgaccaaaccatcgacgtcatcgaaaccagcgaaaccaaaggcacgaacggctcctggagccgcagcgtccgcaagaacgccagaaagctccttaccccccccgacgaactcggccgcctcgacaccgatcaatgcatctacctgctacgaggcctaccacccttcctcagccacaaactgacggactaggaaggagagccatccatatgcggacagtatgacaagtgcatcaacgaatcaagtctgacagtttatccgttgaacagtagttagggaagttcaaagattcatcaacatacacgagaggttgctcttaggtactagtgtggtaagacagtctgagagatgtcatgtttgattaggagtttgtagggcgatgaagatatcttcggtgattgttagaaattacagtaggctaatcgactgcactctggatgttagagagaacttgatactcgtaggacctaacggaagcgggaaaagctcattaattagatgtcttgatctgttattgggtaaaaccatgcagcaactgtattacagtatcagtagttcagattttaaggacacagaatgtccactcattattgaagcaaagttaacaaatcttaatgaggatgagctctcatttttcccagacgaagttgatgcttccgacggatctttgacaattcggctggaagcgatcttcgatggcgaggatcttacgattagccgttattgtcctaaaggcgtaggtagcggcacattgagttcatcacagctcaaaagtattagatggagcctaattccatcggatttttcagctaagtctctaaattcagggcgaaagactattgtcgatgattatcttaaggaaattaacgtgtcgggtgataagacgaaactagaagaagccatcaacgtgctctgtagtgcaatcgatacttcaagtgcctttgatggagctttaagatccttggcactgcagttgaacccggcattggcaggcggcgtggacgctactgatctccgtttcattcccggagcagcaattgatggaaatctgctgagcgatgtgagattacagataaagagcaagtccggagttgcacgagaagccactgaacaatcagacggtacaaaggcgttgattgccttcgccgtatttaatttgctgaattcagacggaatcatcgccattgacgagccagagactcatcttcatccatctgcccagcgtaatttgatgcgtattttgctgagcatggggcgacagctggttatcgcaacgcattctggggtcgttgctggcgagtttaatcctgacaatatagtggtaactcgggatgggcttattcccgtacagccacgtcaggggttccttcagggagatcaaaaagcactagcaagatggtggataggcagtagaattgagcttttgacagcaaaacgtatcattgctgttgaagggcaatcggacaggatgctagtagaaaaagttgctgagctaaccggccagcatttggagagagacggcatagagctccttgaagccggtggatgtaaggaaatgcctcatgtgatgagcatctttggagagaacggtttcggcatgcaggttagcgttctgattgacgaagatgccgaggcttatacagcaaaatcattaggtgttccggttaatgatctcgcctcgaaagctgtatatgtctcaaggattgaccttgaagatgaatatgtctccgctatcggagcggctaaactatgggacaaacttggtgagtcgagtttgtttagtccagaaatattgaggacttgtggcattactaatgatgcaagcattccagatgagggtcagcttgcatctttctgcagaaataagaaaaataaaattgcttgtgccgtaattgctagcgaaactttgactaaagattccgcagaaaaggtttctagcgttatcgaggtgcttcagaatgacgtccactgagtatttcatgacgcaagagcagcaggagattttcaactatcgaccgttgagcatggtgattactgcgccggcagggtgtggtaaaacggaagctctcgcttatcgtgcaaaaggtcttattgattgttatgattttgcagggaatgggaggaagctgctggttgtatcttttacgaatcaagcaaaggataatatcagcgagagaattaagaaacacattggattgcaaaccatgcggcagcatgtcacagtatgcaattttcatggattgtctgcgagaatcattaatgcgcacagggaaatgattgggcttgacgacgaatggactgttgcgaattttgactggattggaagtttcgtgcgatcccttaattgcgacgggaaagtaaagatgcaggccagggaggcacttcaaaaaataaagcttgaatgtctaactgacaatgaagtgagagcaaaaattcaaacaatttgtggacaggtcggcaatcttgcacagattattgagaaagagcggattaaagaaaaaattgttacctacgatgatcaaatcagaactgctttatggattctgcaaaataagagcgtcgcgaaactttataggaatcatttttttgcggcgctagttgatgaatttcaagacttgactcatcaacaactacatcttgttcaagctctctgcaaggagagagtcacgttcgcaggagaccttgctcagggtatttattcattcgctggaggcgacgcaagattcgtatttcacgaaattactaagaatactgaaaagcaagttaagcttcttaaatcgttccgttcttcgcctgccgttctcgatgccgtcaattcactctctccacgaaccggtagcgagcatctaagcgctgctttcccggaacattggggcaacggcgggctctcttcatatgcttcattcgattacgaggatgatgaagcggaatgggttgttcgcatgtgccaatttattttggaacgttgtcctgagcatcgaattggaattatctcacgaactgctttccgaacggaatccgtcaaaagcgctcttaaatctcataatattagctatgccgactggggagatggtttattcaggcctgaaacagcaaaaatattgcgaaatatctgtgatgaattatcaagcgagtcatgtaaagaacctgaagaattaatgtccttcatcaagaagaggtataccgcttttcatggaaacttgtccgaagaatacgaagatgcatgtggatggttgtttgatcggctagcgcaatctgatgcatcttcaatagcagaagtcaaaagatgtattaatgcgcaaaaaggcaatgaaactattgcaacgcgcaaaggaatacattgtttaactgggcacgctggaaaagggcagcagtttgactgggtgtttgtcgtgggacttgaaaaaggaaccataccgttctataaagccaaaagcgaagaggctctagatgaggaagcgagagttctttcagtaatgatctctcgtgcacgaatcggttatgtagcgacttcatcttcaactaacccacgttctcggtattcaagagatgcttcatctttccttcgttatctgcaacatgctccgaatttcttgttcggtaaagatcaaatagaattgtggtgtgctgaagcggattggacagcactttcgcagatgtagttatatgcttattgctcaaagcgatccaacttagtcttccgccatgccagtgctaaaaatctaggtattgttgcgaggtgagatgttcttttcatctacaagctaacagaccgaggttcggggtggacgtcgtttctttttagggttaagccgtcgaggcatgagcagacgccctatacgaaatgatgatccagcgaccaaggacagcggtcttgataagtcagttgacggtatccgtcggctacgtccttgccaagggagcgtttgatccaagacaaatcaataatgcgagccatgcagtacaccgtgatatatgccgctccgtggaggcgtaacatcgccgcgacggattgtacggtcgccccacttgcccaagaatcttcgattaataggacatgggaaagatccagatgctgtgattccggtgtgagtgagaaaatctgcggatcgatgcgattatgcaccttcccggcgtttgcattcaaatgaagttgagggattctctgttgagacatgaacggcttgaccaaattggtcagggtatgagccttcccataattacgactggattgggtggaaggaatcgttgcccatgaggtcggcatactgccagtaagacgacttatgcaggggtagtgcactgccaaggcgtcggctgcaatgtacttgatatccgtctggtatttggctgctgctggattggtgaggtttttgtatccttgcatgacgcggtacatctgctcgctcttataagcgtaatgaccgaaacgcacggtattggcgagtttgacgccaccggggcgtagcgcgcgagcttgctgggactcgacattacaggccagacacaaaggatatgatgcgttcttggggccaccgcatagcgggcatacatgattctgtgcactgctgtaaatgacgcagggggcgtaactgcccatgcgttcggctttcgcccgttccagactttgataagcgctcgggcgcatcgaatcgctcatacggtggcagattcctcggcaagcacggctttgatgaggtcatccacgttatcgttgacgtagaagatgcgatctagcgcccggctagcccctaccacgtcatcgacaatgtacacgccaggcctgttttctaggtcgcgggcccattgggccttatcgagcaccatgcggttaatgatgatggggcggccgtgacgttgtgcctgacgcgcttgagctcgcgtgccggaatgttcgccggcatccgcaataatcgtggcaactccgtaaccagacatcagggcattgcgcatcgggaacgactgcttggtcggctgggagccgggccaaaactgcgaaagcaccaacccgcgttcctcaatctcatgctgtaggccacgattctcggccgggtactgccggtcgatgccggtgccgataaacgccactgtgcgtcctctatcgtccagtgccgtctggtgggcgaaggtatcgatgcctttggccaggccggcgatgacggttagtcctcgttcgaccagcatgtgggcgcaattcacggcgaaatgtgcgccctcgggtgtgcaatggcgtgatccaacaacactgacgcccgggtcgtcggctttcaaatcgccgctggcaaacaagaacggtggcacatcgatggtggcgcgcaaacgttcgggaaacctcgggtcaaacaccgaggcaaaatcaaagccttggtcatgccaagtctcaaaatcgcggacggctgcagcccgagcctccctcattcgatcgacctgttcgggactcggaccgatgtcatccagcaacgtgccctgcatattgtcgccatcggtatcatcacgcagcagcggatgcgatgcgggatcgattttatgcagaagtaagcgttctgcgctgccttcgagcacgcaatcgttggcgatggaagtccaagtgtctggtttctcgcaagtcttgagcaaagcaatcagcgcggagttttcacgcatgagttcagcatgatccatgacgcacctccgttgttccaatcgtttccatctctacggcagaccatagccatcatctagcttaggcacgacgcatgaaagctaatatgatatctatctttttcgcaccatttgcggacattttgtgcgactacgttgtcagccgacagatgccacaccggtgttcgattcccctgacttgtttccatcctaggcaaaagatgttggaatgtcagtgactcaaccagcagcgacgctcgaatagcgtctaccagccttcaattaaccatttcataaagagtcggggaaagttgagggagcgtcgatactaggtacatcccatgatggggctgagggcgacggttgaggtgcaggctgaggggtggcaagagaagctggtgctgagcgattggtactggttgatggctgctgctggatgggtgcggactctggttcgaatgtcccggacggctcagctggcgcggatggtgcttcttctgcctgtttgatggcgtctgagagacgctgggtgaggggtctgcgctttgttcagggcagcgatgtcggtggcggtgtgcagggcgttgcgagcggcatcgagttgagcgccgagcgatacgcgcgtctcgctaacgtcggtgttggcctcggtgagtctacgcgcctgttgcgattgcctgatggcggcagtcgccttcgagagttcgtcgagggctgccttcgtttgcttgttgcgcgcgtccgcagtacgggcgttctcttcgagatgtgccgtggagaggccctcttcgcagggaggaatctcgttcgtcgcgtgatgttcgaccgccttgcgtagagagaccagtgcctcgtgatcggtcacgtcggtgtcgcccaacgccagcagtggtttggcgtcgtccagggctgcgttccattaattgtataacttgtttgattgttggattgcttgattgcatgacgcgagggcctgtgcatgggcatggcgttgccccgcgatgatagccaccgatgccaggacaccgatcaggatgatgactgcaatcagagccaggatgcgtgcccacgggacgcgccgacgcaccctgatgggcggctcctcggtttcgtccgccgtcaagtcgccggtgaatatttcttctgcctccgacgtgtcggaggcagaagaagatgctgcgctctggtcaggggtctcgggttccgtgattgtcgaggaatcagaggcagcgggatcgcccgacttatccgattcgtccgctttgggttccttttcctcccataggattggctggatggcgcggtgtcgccgtttgcagggtgtgcctgtcggaggctcgggtggcgctccggctgccgaagggtcgtcgagcgcaagtttggcccatgcggcgagagccggccatgcggccggatgccggggaacttggtcgagtaggtccccgtgcttggagtcggccatgaggtcggcgagctcgtggggatcgagccgtgggttgatgcgtggcatgatcccgctcctttcgtggtaagagctgcggctagtggatgtaggtgatgccggggttctcggcttgcccgcgtgtcagcaggcgcgtccaggcgcggcgttggccgccgccggattcgctgatgaggatggagccgtcctcgtggatttcctcgacgatggcgacgtgtccgtattcgccgctggctcccagcactcctctctcgaagctcatcacgtcgcccagttggatggtgccgccggtgggatatccgtgttgcttggcgttggccgcccacatgtagctgtggcccatgtaggaatcgaccggtttgccgatctgttgccgtcgggcggcggcccactaggtgcattggcccacgctgtatgagttgatcgaggccacgggcacgccgctggcgtcgatgtcaatgctggtgccatcgacgaccaggggcgggctgagggtgccgatggtggctccggccgtggtcgagcatgagccgccggcgttgatggctgggcgtacctcgtccagatattccttggtaacgttcgggatgtcgggatatttcattaggttgccttcgcctgcgttgtgcgcgatgaccaaggcctccaggtcggatagtcgggcgaattgcgcgtcggggtggcttgccttgatctgtctgacgccttcgagccggttcttgagatatatgccgccgtattgggcgtggacgtttggatcggtgatgccttggggcggggtctggtccgcgccttcgggatgcacgccacgccacacgctgcggttaatctgcaacaggccccaggtgcctccgttgctgtcgttggcatacgcctcggggtcgaacccagactcgcggcgcatgagaacggcgatgaaatccgttcccactggattgggcggcccgttcgacctagggcttggcctgttcggacacttcgacgacgctggcctggcaggtggatcgtccgccacggccacggtcgtgataagccacatcaacagactcaccatgagcatgatgatcgcgccgacgaccagcaatggcaggccggcggccgccgacgtcgtggccatgaccgccgccttggccgccatcatggaacgatccatagtccgaacggcccattgcgtcgctcgcatcgaggaaccggctccggaacgggctgtccgccgcgtccggctacctctggctagaacaggggagtgtgttttgggtcgggatggaacggacgccgcgcacactgccgcgccgcgcggactttaccgggccgatggctcctgcctcgcggcgatatgactcgggaaacagtggaagcgggagaaccgccgagggcttcgctgccaatcgtatccgtatcatcgcttgagacttgcgtttgcagaaacgaggaggtctcctccgttgccctcgtcagatgacgcagcggcatccggcttggcccatcgaaccggcttgatctggccaacaccggcttggacggctgcccgtcgatcctcggggcatgagcggcattgccggcggtcggcgaggcgtcctcgcccttaagcccgatggggcggccgacccgcagctttcgaggcatggggccggagaattgtgcggtttggcttggccgtccgatgggctggggcttgttcatggatgctggtcctcgaatttggtggtgtacagctggtagagcaggctgccggtgtcgagtcgtccgtcgaagggaatgaacgcggtgccggacttggccatgccttggccgggctggacgccggtgaagaagccacgctgctcgtccgagagcttcagcaaatcgcacagggcgtcggcgtcgggggggctggttcatcaacagcaggaagtcgctgttggcgagcatgagccgggcggccggattggccaatagctcttcggtgttctgggtgatgccggtgggcgacaatcccatttgcgcgcccgcttgtagatgcgcaggaatgtctcggctgcatacgggctggagaacagcagatggaactcattgacccacagccatgtgcgtcgtcccagggcgcggttgcgcacgacgcggttccacacctggtcgagcacgaccatcagaccgagggtcttcaattccgcgcccagccccgacacatcgtagaccagcagccggttcgcggtgtccacgttcgtgggatgcgcgaaggcatccatgccgtcgatggcgtagatctccaacgcgcgcgccgcatccgcggcctccggctctcccaatcgattcaaacgttccgtcagatcgaccagggtcggcgcgggcctgtcgggcttctcatggtgctcgcggtaaagctgcgtgaccgcgcggtcgatcaggctacgctggggcttgtcgatgccgtccgcgccgccgatcagcgcctcgaccatgttcagcacgctcgcgcttttgccccggatgggatcgccctcggaatcgtccgcgtactcgatgttgagcgcgttgatgtgattggaggaacgttcgccaatctcgatgcgctggccgccgagcctgtcagtcacacaagggcgtgaactcacgctcggggtcgatgacgatcagatcgtcctgctcgcgcagcaggaacgtctgcgtgatttcgttcttggcggcctggctcttgccacttcccgtggtgcccaggatgaacccgttgccattcatgcccagcgtgcggtcaatgaccagcggattgccgctcctggcgttgacgccgtggaacaccccgcccggctggcacagctcctgactagtgaacggaacgagtatcgaggcgctggacgtggtcagggtccgtctcatcggcggcaagggattgcccaagggcagcgccgcgctcaatccctcgacctgtatgtaggtcagggattcggccacgcacgactggccgtccaccgtggcctccacctcgcgtacgacctgcgccagccgttcgggaccgtcggcggctacgtcgatgaccatgagcgtgtccatgagccggtcgccgttatgctccagatcacggcgcaattcgctggcctgccccatgctttcctccaagtcgtgcggcagcaggtcctcgggcagatgctggcgacggttcctgcgcctctcgtcgatggcctgcatgtccatctccgcgatcttgcggttcaccagccgcaacccctcggccttcgcatggggtcgcagatgcacgctcacgatgatgtcggccttgatatccgtcagggaagcgaccggctggtcggaaagccactcggggaagtcacgcaccatcaggcactgatgccacatctcgcgcgtgcccgagcacagcttgacccgacgccggtcgcttgtgtcgatggcatatggggccacgcagtccttcgtgcacaggccgtgcgaacgggagaacgcatcctcgtcgaacgtgaaacgcacgccggggcgcagcacccggtgcaataccttgagccgttccgcgcggttgagtttggagccacggcacccgcccacggagcgcaattgtgcgatggcccgcaaggccgctcggttgagcgtggctacggcccgctgggcgtcctgctccgcaagggtcaacgtcaggtacttgtcgcacacggtgccgctcgactggcccgacagcttgcggcgcacatgacggtcgaaatcctcgcgcaacgcatccaaaccatcgcccttgacgtccatcgccagcccctggacggccgattccgggtccaatgtccgagtcatcaccgtgacctggatgcccatgccctcgcccaccgagttgagaaaccggccccaacgcgccaccacatccatctgcacgtcctgcgaggcgatctgatagctgatgtcgctgatgcgcggcgtcacgctccaacggtcctgcccgagataggcgacgccgccgggcagcatcgaatcataggcgaccaactccctgctcgaccgcgcgactttggcggacccgccgcctttccttttcatacgcttgccatcctcgcgttccttgctctcaacggccacgcccgctccttcccgcgccctgcggagggtgcgttccctcaacgacggtttcgccggccacttggccggctccaaatcctccagcgtgtggatgctcctcgaagcgctggcggagcatatagcccagatagcgttccggcttcaggcccttgggacgccaccagccccacaacgccggcggcagacacaccacgaacaacaaatacgagcccaggtcgggctggtccagcagcaggaagaacacggcgacctcgctgcctcccagaacgagcatgagcgccgaggcagccaactgccgccatcccatgccccacatgaccttcgcctccacgctggcgatctccgcatacacgcgcatctgcaacgccatcaagctcctccttgaatccccgccacgctcactcgccgcctgcgatcgcacggctgacacgttgggagaccgcgatcacgaaaaacaacagaatgcccgccatcaagaggttgccgaaattgcccgtcacccacgacatcatccccgacccatcgccctcgggcagacgcaccgcgttgatcacgatgcgctgatagaacaccaggcacacgaacacgcacaccgcgttgagtgaagtacgcgcataggccttgaaatagcccatgcctaccggcttggtgtcctcgtgcaccaccaaggcaaacgacagcgactggaacgcggtcaacgcatacaattcgatgaacctgatgtacagcaccacggtgaacaccaccgccgcgagctgcgagaccaaccacggaatcgccagcaggaagaacaaggccgcctgtcccatcatgccggcgtcctcgacctgctcccgcatcaaatcgcccaactgaccgccatcgccggccgtatcgaacgacaattgcgaggaagcaccctgcataaggaactgggtggccgaatcgaacgcgcgcaggaacaatcccgcgttctgaaccgccagaaacaccagcgcgaccttgaacaacgtgccagccacgatcttcacgcccaactcgcggtcggactcgatgcgcgtggaattacgcgccagctccaaggtgaacaccaccgccagaaccaccgaggtcaacggcttgaccgccacgtcatgcacgttcacggccaactggtaaagcgccggattccacgtctccggcccctgcgacagcatgcccgttatcgaaccggcgccaccgcccccgatcatgttgagcatcgcaacgatgaaatcctccatacaggatcccgatgcctcaaaccggctcagcccaaagccacggcactgaagatctgcgccgccgcgatgatcatgccgccgcccacggtctgccacagacccgactgcgtctgcggcccgttatgatccttcaaaccaccgccgaatgtcaccgcgccccacaccagccacagtccaccgccaatcgtcgcgaacttcacgaacaactccagcacctagttcatcaaatccacagccgcactcctccgcacaggaacggcacggcccgccgccatgcccacgcatacggccatcctcgaccgattccacaaaatcagcggcggacaaattcacacagcattcgttcagcatacttacagaaataggtaaatcaagacgctatagtattcaccaaaagatgcccgggaaagggaaaagaatgcagaataacgaccaacagcaggatgatctttggattaagcaatctctcggcgctgcttcaaactgggagaaattagccgaagctgatcaagcttcccttcggaaagcggcagcatggtacgcaatcatcgccatcggattagctgttggcgtggggattctctcatttaccattctgcaagacggtgcaaaggctacacttgtgacttcgtcgctcgccatcattggtgcggtttttcctgcggcagaaaaagtcgtgtcgggatcaatggaatactttgaatcaacaaacgagaaacttcatgtcgcaaaacttaaattgatgcgtagctatttcaatctatatgctttgattctggtcggcgctgcgcttctcgatttcattgccgcagcattcctcggcctgtggcaataacgtttggagatgacgtgaaatgacaggtgacatttgccgaatctgcggtaaagaaggaccgctgagctttgagcacatccctccccaatctgtgggtaataatcacacggtgaagctttattcaggcgttgacgccgtgaagagcagtttgaccgggcaagatgatatggaaggcatgaagtatcggcaattgcaaagaggccaaggattcaagacgatttgcagctcatgcaatagctaccttggtcaaaactacgtcaagccattcagtgagttctatcttgcaactggacagcaagtccttgcttctgactttcaggaagaggataaatccattcatttcaagacggataggctcatgcctcttgcatttgtgaagcaggtgatatcaaacttctgcgtatcagctggcgatatgcatgactgtaaggactatcttttggatagggagagcactgttttcccccagcgatacagactccatatgtttatagtcgataacctgcgtgaacaaaagctgttcaccgagtggatggtcctcctattcgcggattacacgtgctgcaaaatggcatgtatccggataccgccattcgctttcactttgtttgatctcagttctagtaataaggtgcctgaatggctgggcgatataaccgatttagccagagtgccgtggggagagaaaccttgcattgagtttcacttgccagtgcttaaagcagcgaatcatagtccgctgtcatgggggaatgttggctgaagccgatgggggaacagacgactaggcccgcagggctgcgcctgcgggcctagtatgcactgccccgttttgccgggacagttgaatggtatcaccgtctatctgttggctggaacgcgaaaggttggttccggcagcagacagaggattgttgttagttcatgggcggctccttggggttgatggtggtgacgagttgggcgaagtccggttcggaaccgtcttcgtcaggaccgccgtcgcagccagcagcatcatcgttcgcgtcgttctcgtgcccggtgtggcggccgttggctcgggtgaggcgggtatgactgccggaacgctgcggcccttgcgcctgcttggtgcgcatgtcgaggctgacctgagcgaagtagcgttcgaccatcgtgccgtccaccagccatgagatccagcgcggattgtcatacgcccagttaaggatcgtctcgacctccgccagtgagcgttccatcagcagttcgtggaccttgcgccggtcgcgcatcgacgccggcctggcggacttcggatcgatgaccgccacacggtcatggatcagcgtcagcacgcgcacctcctgcaaggcccgggaacgcacccgctcatccgcatcattggggccgggcgtccacaatgggtcacgcactccccggggcggcagcgccagacgccaatccggcgcatcgtgctcgcttcgttcctcttcaggtttgttccccggcgaggggaatgtccccgtaggggacaaggggagcattggttatcacttgtctattgggtgacaccatgtcacctctcttcggacaggatgtcaccccaccggcgtgatcaccctggggtgacatcatgtcaggtgacaccatgtcaccccgcgcgcggcctttgctccgcgacggtccggccgcaccgggcctcgccggaacgaccttgtccgcgccggcttcgccgggatcggtgatgtcccccggttcggtctgcacgcccttcatcaccatgtcccacaccttggagcgatggcctctggggatgggctcgtggctgcggggattgcgcgcggccagctcctggtcgcccctcgcgcaagtagcccagctcctgcaagcgcttcaacgcacgcagcacggaacggcgcgtgcaatggcaaatgcgccgcgatggtgttgaccgacggccacgcgccgcacccatcgtcgtaatacgccctgcgcgccagatacaccagcacgaacttctccgacaggctcagccgctcgtcctgcaactgccacgcccactgctccgccggcccgctcatcgcgcgtcctctccgcgcctcttggcgtcgtggaggcgtccgccgatgcggtcgcccagcgcggctgcacggcacaacgcccacatcaccagcagacacgcgatgatcgagatggcgaccaccgccgccacagtccggcccatctcaggcgctccggcggcgacggcgcgacgagcgcgcgggatgcagcagcatcgccagcaggtgcgcacgggcgatctgcacacgtagcgacgggattgttttcacggctcccgccgcacgcggggcggaagcgatgggtaggattggtcattgcgataactctctttcaatggagggcgaatcccgggactcttgtcacttgaatcgctcggaatcccgcccaaggttgtcgatcagcctcgcaccaagcgtcaacacggtgcggagcgctttcgttttccatgtttttcccggcccggttcgaccagaccgaaccggggaggcggtcgtattgcacatccgcgcgcaccgcccatagcatggtgcgcacaaacccccaagggcacgcaaacgaaaggaacggacatgaccggcaacatcacggcaagaacacaggccatcgaactggcagaacgcctgcgggaagtcgccgcatggaacgtgcgcctgcacctggccaaggaagaactcgaacagcaggccctgtgcgaggcggccagcgtgaccaaggccaccatcggccagaatgaacctcgacgccacatgggacctcgacgccatcgcagccgcagccgtcaccctcggcatgccgccggccgaactgctcgacgacacgctgtatgacatcgtcaacaacgacgacgcgaacacaaacgagggcaaaggtgcatcgttggtggcagcgctgacctcgacgctcctggcacgccacatcgccggcaggagcaacccattgaaaacaaaaggctcctgccgaatcacaatgatggcgacaggagcaaaccggtacccccagagaggattgaccatgtctccgaaagccagaaggaggaatgcattcatgcacattaaaaccgtggggagcctgctcaaacaattgttgctttacggcatgctttttctctctgggtcggccatattcgtggcttttcccgtgtgtatcctaggtcatgctcttgatcagaagaacttgcttcaactcatttgtccatggccctcatgctggccttctttgctcacagtcgtgctttggagcctatgggtttggggctttcgtacgcacctcaaatcttttgcctggcaaatcatatatttccttttcgtgattcgctcactcaggatcatcgaactccagtatgaattccaatgcaattggagtgaagcgcaggagatggcgaacgcgctcttttgcttgatggaactcatgtttgtcaccgcactgctggtgctggaaataatcgcgtggttgaacagccgtaagcccgtcaagaataatgagttcgagataaacgcttggagaatgctctcctatctccttgttttctttcttctgggcattttggggaatgtcataccgggaatgacggatctcatccaagaagaggatgtcggaaaagcgatgatagctctgctcgtcatctcataccctttggagattctcaacatcttctggaatgccatagaaaatgacgggaggaagaacgattcccagaatactgagaatgaaatcgatgggaagttggatgacttgtgcgtgaaggttcaaaaccttctggacgattcccagcaaaagattgtggaaagcgtccgagacatcgacgagaaaatttccaaggtgacgagcgatacgccctgcatattgttccgacggaccgattcgacgtatgagttcaaggtggtcatgagacgtcgaaatcaccggaaataaacgttgtgccagtttaatgtgccgcacgccaacatgtcaacccacattatctcggcttatccatccctaccgagtgcctccagtcctattccctcgacgaaacaagtggctgtgcattcgcctacagtgacacataccgagcgatcatcgttcctccgcggtagcttgcatgaaataagttgaaagtggccggaggagtcgtggacgatgaagaacttgatgaaaacgatgacggtgccgggggctgggcgggacccgacggctgacgagattccgggaggaatcgatgcggaacgcgaggacgaacctggcgaggcagacaggaagccgatcaatggccgtagactccacggctgcacatcctttccggaaatgggaaaggccttctatcgtgacatgacacctgtcttcgcaatcattcccagccaattcagggacggtttcggatgccgttcgaatgtgtccttatcccaacaggccaatccaaatgtcggggcaaacgagccccattcatagttgtcaagcaaggaccagtggaggtatcctctcacatcgacaccgtcagccatcgcatcgtgcatgccagctatggcgccgaaggtgtagtcgatcctccggcggtcgtcggcggtggcgatgccgttctcagtgacgattatcggcgtgtgtccggcgacattccacgtgtgtcggattgcgatgcccaacgccggcgggaagtactcccagccggtgagggtgcgttccgcgtcctcggggactggcacaggtccgtccttgccgatgaaggtccttagataggcctgcaccccgatgaagtcgtccccggctgcggcctcggtgaagtagtcctctcgtggatactggtattcctccatctcctgttcgcatccgggcatagcgtggaacgcctggcaagcgatggtccatccggacttgatacgcggattctcggacagtattcctcgggcctccctgtgcgcctcgacgagcgcggcggagatgtccagatcgggtgcgggcagcgaggcagacacgaagtcgctgccttcggtcccgccacgggtcaatgcgaccatgttcggctcattgatggtacacacccaagtgacgtcgtggagtatcggcatcaagtatcgtacgtatctgtcgaaatagtcaactgctccatcattgagccatccgcccttgactgcgagccatagtggcaatgtcatgtggttcagcgtgaccatgggctcgatgccgttctcatggcacgcatcgatcatgtgacgatagtgcaggagctgtgccttggagaagcagccctccgcgggctcgatgcgggcccattcgatagagaagcggtacatgcccaatccggcgtcggcgagcattctgatgtcctcgccgtaacggtggtagctgtcggccgcgtctcccgacggttcactgaggtccgtgcattcggcgtgctccctggcccaccagtcactcgcgacgttgttcccctcgatctggtgcgcggccgtggatgcgccccagatgaattcctgcgggaactcgtatgtttctctcatatcatgtctttctatttgatgcccgttccggcgacaccctggatgaagtagcgctgcaggaagacgaacaggagaaggatcggggtgaccaccagcacggctccggcgagcaggacgctgtagttcgtggcgttctggccggtggagtaaagggacagggccacgggcagcgtgtacttctcctcggtctgggccgcgaccaatggccacaggaagttattccaggaggacaggaacgtgaggatggacagcgtcgccagcggcggcccgcactggggaaggacgatctggaagaatatgcgcagctcaccggcgccgtcaactctcgcagcttccatcagtgcgtcgggaatgcccgagatgaactggcgcatcaggaagacgccgataggctggcataggaacgggaggatgagcgccgcataagagttcgcaagtcccatgttcgagatgatcacgaacagggggacgaacgtggccacgctcggaaccatgagcgtcaccatgacggcgccgaacaggatattcttgccggcgaagtccatcttcgccagggcgtatccgaccatggagcagaacaccatgttcccgaggacggtaatcacggcgacgaccatgctgttggtgaaatagatgccgaaattcagttccccgaaccatttcgcgaagttggcgagcgaggcgtgctcgggcaggagcttcggtggtttggcgaggatctccctctgggtcttcagggagcccagcgccatccataggaacggaaagatccagaagaccccgatcaccgccaagatgcagtaggaaagaccgcgccctttgacgaatcgatgccagagcgactgcttgttgctttgcggcttcgaggctacgactgtcatgactgccatttcagtcctccctgagaatgcggaactggagcatgctgaccagtgcgatgatgatgaacagcacccagctggccgcggaggcgataccgtactgtccgaaaccgaacttctggtacacgtagtacgcggcggagagcgtcgagtcgagcggtcctccttgggtcatcacgaaagattcctcaaagaactgcaggtaggcgacggaaaggagcaccgcacccagcagcagcgtgggtttgagcagcgggagtgtgatgctgcggaaggtgcgccattttcccgcgccatcgatggccgcggcctccttcagctcctcggggatggcctgcagaccggcgaggaagatgatcatcagcgttcccatgttgcgccagatggtcatgaccatcagtgcgggcagggcgtagcgggtgtcgtgcaaccagtccggaccggcaatgccgaagacggacaagagcaggttgaggagcccatccttctggaggatatacctccacacgacggagactgcgaccacgctggcgacgaccggagcgtagaacaatgctctgaagaacgcgttaaggcgcttggaacctttgttgagagccaccgcgaacgcgagggcgatcaccatggtgatcggcaggcctacgagcacgaagatcccagtgacgcccagtgcatgcaggaagcgatggtcttgggacagggcgatgtactggtccagtcccacgaagttgacgttgaacggggtgcggaggtccttggaggtgatgtcggtgaaggacatcgccatcgaggacaggagggggatcagcatgaacacgcagaacacgaccgcaaagggcagagcgaatccccatgcgagaatcgtccgacgtcggcggaggacgttgccagagccctccgtcttcgccttttttgttccgaatcccatatgctcagtttcccgttccgatggagtcagcttcggactgcaggttcttcaggccctcgtcgacggagacctgtcccttgttcatctgttcgaggatccggtcggcggcggaggacacctgggaccaggtggacagcgccggcggggccatggtgttcttcagttggtcgccgaacgccgcgagcttgtcattgccggagagtgcgtcgtcgtcccatgccttctgggaggcgggcagatcggaagatttttcgtaccatttggcctgtgtctcaggcttgctggcccattggatgaacttccatgcggactgcttgttcttggagtccttgaacgtcacgaggtcgcaacctccgacgaaggacgtggcagggcccgaagagccgtccatcgacggcaggaccacggtggcgtacttggattcgaaaccgtcgccacccaattcgttgatttggctgacggcggtcggaccctgcagcatcatcggcgtgtcgccggatacgaagttcgctatgtcagcgccggggcttacgtcggcgttaacatccgccacgccgtccctgtagagactggtggtaaagttcagtcccttctttatgccagtatcttcgaaagtccatttcgtctgttccttgttagtcaaggacgccccggccgagtaggagaacggcaaagttccgaggaacgcgtcagtgccagatgggttgaggttcatgccgtatttgaccccatcgaccttctgcatgtccttagccatctgcttaagctcatcccaagtcttcggagctctgctccaaccagccatctcggcgatgtcggtgcggtagtacagcactcgggtgtcgatgtaccaaggcacgccgagctgtttcccgtcgacctggcccgcagccttggagccgttggagaagtcggacatgtcgaggttgtcgggcacggtggagaacgagttggagaaatcggccatccaggtggtgcccatctgcgcaaggtcgggaccgttgcccgcggcgatggcggtctggagtttgtcgtgcgctgaggaccatgggatcgcggtgaccttgaccttgacgtcggggttctccttttcgaatcccttgacgaaatcacccagcaggtcgccctcgttgcccatggcccagatggtcaggctgccggtggccttgcttgaatcgatggccttgaccgcatcgggatcggaatccgcgctgcttgcggatcgcccgcacgaggacatgctgataaccatgaccgcacttgcggctaccgcgacagccgccttgaaaaacgatttcatcattgaaactccttattaaatgtgagcatcaatctaagcggttagactgacgattatatttaagcgcttagattgttttaagtcaaggagacacgccaataaggcttcgtgcttctgagttttatttcatcaggggcacccacagctaccgcgcacgacgagacgaacgggcaatattcgtttctccggtttttcccaaggcttcccattcctggaaagcagcatccgtgcagccttgcgtcccagatcctccataggctgacggacggtcgttaggtgtggagtcatcagcctgcccgccaagatgccgtcaaagccggtgacgatgacgtcttcagggacgcggattccggaatccgcgagcagtctaatcacgccaaaggccgtctgatcagtgccgcacaccaaggcctgcggcaaccgattagattctatcgcctcacacaggccgaccaaatattcatcagacgtggcgaaagagtcatccaacaacgcccctctggagtccagcccgcgttcctcgagatattttttaaacgcgtcataacgcgagacgacgtcatcagtgtcggcaccgctctcgaacgctttatcattgacaccgccgacgaatgccatatcgttgatatggtgaacatcgacaagatggtcgacgatctgcctcatgcccgatgcgttatcgcattgcaggtacgcggccggcagtttttcatcgcccacccccaccattacaagcgggatggtcttcgccaacatggaaagaggaagcgcatcgttatatccgcttggcatcagcgccagtccatcaacgcggccggcgatatccgttaccgatctgtgatcatccctttccgaggcggctcccataagtattcccttgccactcttccagcattcgagttcgaaaccacgaagcacctcatcaacgtataacggatatacaagaacgttgggttcgtcaccgtccagaggctcgtcgatggatctgggggaaacatcaggccaatcatcctcaaggttgcttccctgaggtctttccagcaacatatcgaatgcatacatgcccaaagtgtcggtgctacctttagcgagtccttgggcattaccgctgggcacataaccaaactcctcagaaatcctcaggattctggccctggtatcatcttttaccttatccggatgtctaaaagcaaaggagaccgtcgcggtcgatacaccagctttttttgcgacatcatacacagtgattctagccatgttaacaatttaagcgctttggcacagaggacacacttaaaattggctaaattgcattttgacgttcctgatacattgtcaagcgcgtcggtgtgttggttttgtctgatgggcggtcgtagccagtcgatgattctattttcgagtccgggtaggtcacggatccctctttcgatttcgctgatgtgtctgaaaggcacgcaacgacgctttgccgatccaccgttgagcgacgccgcggcagacgcgcagtctggcacctctgcacctctgtatttagtcaagtcggcgttttgtgactaatccgatgtggtgacgttttcttggactccctgaacgggaagagaacccttttatttatggtggtgtgcaataagaagtagcacgaccacgcagtcgatctctacgaacggtacgatttcagttccatggccgtgattcatgagctcggatacccgttggaaccgtcgctgaaggcatggtgccgggaccggggcgcgaacggacgacgggcgagccatccagcgtggcgcgcatcggcttcgtgacacggatgggcagaaatgcgcggcggtcgatgactgtctcccgcacggacgttacatggcaagcatgatgcggtgtctgggttatccgaagaacaaggcgctgttcaccgcgtggatcgacgggctcgcccccggccaacacaggctgcgccacgggccagtacccgaggagctgagatgcaaggcggtggtcgcggtcgcgtccggtgggccggagtcgtgtgaggtcgccaccgaactggacgtggacccgtcggccgttgggaagctggaagcggcggatgctcgaccagtccggggagaagaccatgaccgaaccgaccatgaagcccgaaaagcctaggaaaccaagaaaaacgggacccgtgaaaccggcggaggaaccggagccggcggtgaggccgggcgggccggtcgcttcggcgatgccagaggagttggatgcggagctcgccgacaagatccatctcgaggaaaacgatatgaacggtctggaacgcagaatggccgacatgctggacacaactgcggcaacattctccggtggcatagaatcaaggaatcacacgggggagagttctccatcaacggcttcctcaaccattacccggacttcctgtccatgaccaggaccggccggatactcgccatcgagaccaagggtgaaatgctgaagggcgacgacagccgggacaagctcagcctgggcaacatgtgggcgaacgccgtcggagacggctaccggtacttcatggtgttcgagaacaatccgctggacggtccgggatcctacaccttgaaggagtccgagagatatcctgaaccatctggcatgaccggcacggccatgtccgtggacgcgttcagttcccgccttccatacggctggcgttggttctgaccacgttcatgtcatggacgacgaccgcgtaatgggtgtctcctcccgcatcacgccgttcgccggacatgccgacgaactcgatgacatccccacggttgacgtcccgcatcatcctcgacacgcgcccgtcatacggcaccagcagcacgtacaggctccggccggcctcgctccagacgccgcgtagggccggacacctgcgcccgtcggaggtacgcagacgggtgatgcccgccatgggcacgctgacgcgtcccacttgcgggctcatgccgatcatgccgtcatggggcaacagcattctccaggactggttcgtcgcgctcaccgcccatcacccccatccgtgccgtcggtcgatccctgggcctggccgaagaccttcgtcagctggtctccctcaaggctcgcggcgcagcccgacgtcgcggacgtgaggtcctgctgggctttagtcagcgcgtcgtaatcctgggatttgccgttcaccaacgatttcgcggtctcgtacgcgccgcgcaggctcttgcaggatgcgtcagccgaacccaaccggtcgagccggtcggccgccctgcccgcgccggacagtgcggactcgagatcatcgagcctcgcgtctatggccgcccgcatggcctgtggataccattgccgtgccagcgcacggacccgttccaccggcctttcggagccgatggcgtcgtacaggtcgctcgcctccgcgagatcccgatggtcgtgacggtacagcaggttcgaaagcgtgtccacgttggagtcctccggggcgttgagcagttcgcgtacctcgtcggcgatgctttccgcatccccggtgaacatcgtggccgcctgctgttccaacgtcccgttcctcacctttttcgacgggtgtccggacgaggtggcggacgatgatgcggaagcggaccccgtggccgtgccaccggtggaacgccacgggttgaacgcgaggaccatcagcattacgccgatgacggcgatgatgatccatacgcgcgcctgacggacctgggacggtgtcgatgagggacgtttgcttcctgacatgtgatgctccttgtcgttcacaggctcgaatcggattcgggcaggccgtcatcggtttcgggcgcgggtacgctccatccgccggagttcccggaatccgcctgtccggaggaggagccgctaccggaaccactgtgcgagcctccgatatcgccgccggaggatggggcctggtattggggcgtcgtggtctgctgggactgcgtctgacggcgtgcctgttcctcctgttcggccttggccttcgcgtccgcctcggctttggcctgttcgtccgccttgcgtttctcctcgacgagcgtggacacgctcccgtatgccttgtcgagtcgagcgcgaaccctgtcgatccggtcggccgtcgcgtcgtcggacaatgattcggcctgcccgatggccttgtccagatcggacagggccttcctgacgtaatcctccgatttgacggaggatttcagattcctggcctttttaagactctcccgcagcttcttggaggcggtctcgcgtttcctgtcggcggcggacgtcctgaccttcccgttcagtgagagggtgcgtttcgtggccatgtcggccttgccggccaatgattcggcccgcttcgcgtccagtccgtcgtgggaggttccgaggatgacgcgattggtcttcacctgggcggagagttcgtcgagcagatccggatcggacaggtcatcgctcccgtacgagccgagcatcccacgcgccttgccgttcgcgcccttcaacgcgtccatcgacgaggtgacgtgccgtgacgcctccagaagcgcgttctcccggacttttccgccgacgacggccaggccggtcagaaggacggcgagcacgcacacggcgatcaggatccgatgcggccattttcccgcgcgggcgggtccgccgtcggcgggatcgtcatggtccgccacggcttgcaggctttccctcatgcccttgcacgtctcggccggcgtgatggacgaagcgtcgccggcgggcaggggaacgtctaccgtcggcgtgatggacgggcctatcggcgggttcgtcacgccgtccgcgtcttcggatgcgctcaccggcgacggcacggcggaccccggcggaatcgtgggccgttccggccccgtcatgctcccatccgcgacgggtccgcccgtcgtggccctccccgcgggcatcggtaggggagccgtctccggtacggtcggatccgtttcggccatggcgatcccatgcccgtccgtccggctccttgcgcgccggcgacgggaacgttcctccgtcccgccgtcccgcgtgccggaggccttcatctcctcgaaccagtcgagatcgtcctgcccgtcgcctccgcccagttggtcgaacaggctcggccgcatgccctcattcatgccgctcatcgtcgaaaacctttccgatcgtcccaagaagccgttcgatccggtcgaacgtgccggtgccgttgtccgtcaaacgttccaacagttccacgtcgtcacgctgcaggtccaacggcaacggcgtgtacccgtcgtcggacgggctgcggccatgctcgcgcagtacgtcgcggatccgtcgcgtctcgtccatgagccgtcggcggtcctccccgcgcatgctcccgccatcgtcgcgaagacgcaggcccgcggcggacagggcgcggtcgagccggtcgcgttccttcgattccagtgaccggtattccaaccaacggcgtcgcgccttctcctcgagcaggcccgcatgcttcaacacgtcccgtcgggcatcgtcgtcatcacgggccaacgcccgctcgaaatcatggcgtgtcgcctccagttcgacacgccatgcggccaggtcggagcgtaggatcccgtcactgacctcagcctcgtattcgacatgatggcccgtgggcaggtgtgcgatgtcgtccaacgcgtcctgatccgtcatgaacgatgcggccggcgtcatctcgccggtcatcccgtcgatctcctgcatgcggtagccccagtatcccggatcgaagtcctgccgtcggatcgcttcggcccgttcatgttcgtcaagacccggatccacgaccggagcccattcgccctcatgccggtaccattgcgcgtatgcctcacgacgcgcggcctcacgttcccgggcctccgtatcggagagatgatgccggtgatcgtcggatttcgcgttggaatccttcagatcgtccttgacccggtccaacgcctgatggatcaacgcctgcagggtcggcatgtacaggccgccattgccgctgcccaccacgaggtccatgtagcatttgaggctgaacacctcgtggacgatgtcatcatgcaacagccagcaggaaggcagcgtctggtcccacgacggatagtgcgtggtcaggaacacgcccatgcgcacggtgtgcagcatcatcaggtcgatgtcgcgacggggcggggcccccaacaggtccaccggacgggcgacggtcatctccttcttcaggtcggtctggcgcatgttcgcccaccggcccggcccgtactccggttccacgggagcggggtcgaacatctcgcgggcgagcgtgatcaggttgttcaccatcggccccggcatgctggcgccacggatccgggcgaaccgttcccgtgcgaaatcgaccagatcctgcaccgcctggtcctggtcggaacggtagtcggctcccatgggagtggcaggctccaggtcgtcggccttcacggaccgttgccggcgggcgtccgcgtcggcaacggcttccggttccgtccgttcgatctcgtcgccgaaatcgaacgtgtcctgcgccatgtgacgttccgttcccggatcccgcctgccctccttggagccggcggcctgcatcatccgccggtaatgctcatcgacgtccatcgaccctcacgcctccgtccctgccggtcccatgcccttgccacgacctggcccgcggttggatccgctcgaggcccggacgccaccagttgcgtctcatgaactggatcgtctcgaccagggcaggctgctgtcccaacggttcgaccatcgcatatccgcgcgggagcatgctcaattcccgtctcgtgacggaatcctcacgttcgtggcggcttgagaagccgccgatcggcccttggcccggattccagttgcgttcctccctgattcgcccatgccggccgatctggctgatccaccagtcgagcgtgtcatcgtcggacacgcccttgagcatgatccgatgacagttctcccacaccgtccgttcggtttcccgcccatagccgtccttctcgtcggccatctgctggcgggactgctcgacgatgatgacctgatagccgttgccgccgccctgcgtgatcgcgttacgcaatccgccccatttctcgatgttcgacaattcatccaatacaaaacgggcgggaggttcgatcttgccccgtgaacccgaggtcgggtcgaacgcgagatcctggcacgcctcctggaacgtgtccaacaacaggctcacgaacacgcccgcattgccggaactgccgccttcacgtttcggtttggacaatacgaacacggtgtctccgcgcatgaccatgcgtttgggatccatcagacgcgggtcggacgggctgaagtccatacgctcgcgcacacgcgggtccgcgaggatcgcgaacgcgtttctcacgccgaaccattccgaacctttctgtcgcggatccacatggggcagcgcgttcaacgtcgtggcccactggttcatctcacgctgcggcgtgttacggcggatcaggtcggcggcctcctgtgcggcctcgggactcagactccactggtagcagtcgccgatggtcctatccgagatcgccgccgcatacaacatggcctgcacatacatcgccgcggatacaccccactcctggttgttcgatccggaacccatgccaccgatgcccaccagggtctgcgcgcggcgcatcgccacggacggatcgtcgcaaccctgcaaaggcgtccagaacatgttgtgacgggtcagcggatcgttctccgcgacgccttccgggtcgaagatatgggtggttccctcgccgcgcgccccgtacacggcgcccgtggcacggtcggtcacgccaagctcgcgcaggagacgggtcgccttgatgatgtcgccgcgcgtcgaggtggcaaggacgaaacccggggcctcgaccacggcgggaatgaccacgcacacggtcttgcccgaacgggtcggccccaacacgtacagatgccgttcgcatcccagccatacttccatgtgatggctccaccccacgagcatggcggcatgccatggcttcggcatgaccgcgcccggcctgcgctcctggaattcggacaatgtgcgcggcaggaccgccggcaccacgtcgcgcatcacgctgcgcggaccataggcgtccgcgatctgacgccacgaggccatgcccggacgcgaaccaagccagtcggccgcacgctcgcccgaatcccggtacgaatcccagaagatccacaatgaaaggatcgtgacgaaacagcccacccaccaaggcagacaggcgaggaccgtcgtcaggggatcgcccccggccatgacgaacgagaacagggtggcgatcacggcaagcaacagtgcgatggcgcccacgtgcttgaccaggacgctttcctcatccgacaatgcctcatacaggcgcgtgtgccggtcgagccagacgcccagatcggaatcctcgaaccgtttccatttcgccatggcctcgcgtcggttctccgcgttgagttcctcggcgtcgtaccgcagacccgtacgcgggccgtccgcaaggtccccgtcgggtgccaatgtctcgtaccatggtcgttcgtccatcatgatcctccgtttcctgataagtggcctttttccgggtcccgtggccttaggatgccttgcgcagtccggaagtgtcgaacgtcgcggcccaacgggggcccgcgacgggaaggatcatgcgcggatgggaccggccgatacgccagatgccgaatccctgcgccaattgcgggatcatgtccagctcgtcctcgctcagatcgggaaccagctggttgagcagtgcgatgttctcgcctccctgacggtagatgatcttcgtttccatcaggttcatcagctgttcgaccttgccgcgcagaccggatccctggttgaacacctgcgtcatgtccgcgacgccgtgcacgatcagccatgtggcgcaaccccaatggccggcggaacgctgcctggtctgcaacgagtcgaccagctgcgggttgcccagcaggtcccacgcctcctcgcacacgatgatgcggcgcaatccgtcgcgcgcctgcagcagacggtcgatccacgaactgaccgcggccgtgtacacgcgtttcaatgtgggatcctggaacacggggccggaagtgtcgaacacgatgatcggcgcgtccggatccaacgtgatggtgctttcccgatcgaacatgccgctcatcgttcccccgtggaccatgggcgcgaacactcgcgcggcctcgctggccttctcacgcgccagatcccggtaatgttcgaagccgcggatgttggcgtacacggaatccacccactgccagtcgctcagacggtccacagccgcctccaacgtcatcggcccgatgtcgtacgaggcgatcagctggtcgatcaaggacagcatgtccttgtccaacgggaagggccgatcctgttcgcggacggcttcggccaacgccatgacggcgctcttgcggccggccaggacctcctggcggaacgcctcacgctcctccctgccggtcagatggctcgcgtcgggcatggcgaacgggttgagatagttgcccgcgcccggggaaacgacctgtccgccgggaatgtcccgtgcgatgcgcacccattcgccctgacggtccgactggacgatcacgtgccggccgtagcccatctccctgaccgcgagggtcttcatgcagaagctcttgccctggccgcgcaatcccgacgtgaagatgtccggactggtggtcagcctggcatcgtacgtgccccaacagtcgaaggtgaacagttcacggctgaacacgtccaggccgacgggcgggccggggattacgggagcgccgctgccggcgacgaacgtggtcaatacgcccgcacgacccgtgctggtctgatgccaggggatcagcggacgggcgttgaagtccttggtgatgaaatcgatgggcgtgggcgagcccaacggaagctggccggcggcgtcgcccagacgctccctgcgcgccttccgggctttgcggatctgcccggcgaccatgcccgacaggcggcttctcgcatccgataccgcgttcccgtcggcccgtgtgaacgcgtgcgggggaacgggcggcagatcgatgccgtccagtcgcgcctcgtccgatgcctgcagccatgccagttccagaagcgtcggccgggtcggggcgggcacgaagccgatgcagtcgacgccgcgacgtgcctgggagccgagacgatgcccgtcatcctccaatgcgggaatggcgtcgtccccggcgatcccgtccgtgtcggcgtcgtcggcgttctcccatcgttcgttctcttccgtcatcatgtccacatcgatccgatccttgaaaaacgttacgaaacgcggtcccgtccggtgaagcgttccaccggacgggaccgacgggcaggccgggggagccggcccgttctccccattgccgcggccgtcacaccgaatagcccgaatgggcgagcacgatgccgaccgtgatcatgagcaggaagcagaccacggcgcacacgagcatcacgatcgccctggatctgcgtttcctcatacccatggcgagcacacggtccttggccctgcgacccaccgtcgtgctgttctccttgacggtcagcagcacgaacgccctgtacaggaacgtcgccgcgccggccatgagaacgaccatgatgattgctggcatttggatcctccctcaccgatgaaacacgtcggaagacgctctcgaggatcgtcttccgtccaatccacgtgaggccggaccgatatccgtacgggacggcgcgatactattccgggtcccggccggtacggtcccgttccgaatgcaggcgccgcgcctgcatgtcccccatacgcgccgcggcgcatagggagacgaccaacatgccaccggccatgccggcgacgaacaatacgatgtcgatgacgagccccatcacggttccttcccataggcgagaggtcttccggaggaaccaccccgcacgcccgcgatatcgcggatgggacggccacaccattccctttccttgcccattcggcgattcccgcatgaggggagggattgtcaagggacgcggcggcggaaggccatgctgcctccgaccggtcacgggaccgcattgacgggaatcggcccggccgtcttccggatcggcgatcggatcggtggattatgcggtgtcggatgaaaaacgtctcgccgatctctgatgaccgacgaacgttccctcatcgcggagacgattcgttccgtgacgacggggagagacgctggtcggaggaaagctggccatggatgatggcgggcacgtccgccagccggtccggatcgtatttgccccgatcgtcgatgaggggcagccgccggtacgcattgtccccgtctccctaatcgtcgatccggaatggtttcgtccgacagtcgccgttgttcatggcatcaggttccatgccgttccgcgggctcgccccgctgtcgaagatcgacgccagtctgatcgcgaaggcctccacatcccttatcaggccgagatcgttgcagtgccggtccgtgttacgcaacgggaagtcaaggaaaaggaaatcatcggtggcacggcgggccgcgtcacggtcgactccgagccgttcgcaggcatccgcccagccatcatcggcctccgtgacacgatgatcggatccggacccttccatggcagcaatggaggcatcgccgtccctcagaaaaaagaatcaaagccggaacggtgcggtttacgttccggccccgcatgggaacccgtgtttgcattactctccgccagacgacccggctcactgcgatgaaacggcatgagcggcgcgacggaaagttcccgtacggtaagacatgaaccacatgcccggcctcccggacggaaggaagggcatgaagttcaagccatacccccaatgtatccacgattcctgcaacacgccaaacggacccctgagcggaccggagccggaaaggaaaccggccgttccggacgggggaccgacgttggggcatggaatcgagaaagaaggaggggtggaggatggccgttcgccggatcatcctccaccccttcacggtgccaggcccgtggaatcccgtttcccgtcccatggcgtgggctgggaaacgggatcattgacgggatcttctcgctcacctgccggagtgcgcgccgcgcgggccggtgccggccgccttgcggcgtgccaggagcaggcccgtgccaagagcgccgaccgcgatcacggcgagcagcatgccgccgatcgcggcgccggtccgggcgagggacgggcggtagccgctccaatcgtcggtgttggactcgaccttcgtgtcggagcacagggtgacggtcttgtcgccgtccttgacgtcgacggcgttggacggacgggtctcgtcgttcttgccgccgaacgggtcggtgtcggtgacggggcattcgacgagcggcgtgccggtgaccttgacgcggtcggtgtgcctgccgccctgccggacgcccttgagcgtgccggtcacgatggtggactcgccgggcttgagcacaagggtgtcccaatcgtccggatacttcaggtccacgacctcgccctcgccggcgatggtcttgtcgaccatctgcagatccctggccagataccaggcgccctcgccggtcgaggagtcggtcttggacgtgttggtgatcttgaacgcgatctgctggctgtcgccggccatcttcaacgcgtccttcacatcgtcgcggtcaccggcctgttcgccggactccacgtcgtacttctcgatgtggatgctcggggtcatgtccggggtacgggtccacacgatgttggacgggaggaccttgtcgttcagatactcggtgaactggttctcgatcttctcgccgaccttgacgcgcttgcactggatgtacgcgcgccagccgttctcatggtcgttgtccgcggacacgagcttgcgatagtcctcggtggcctcgacggtcacaacgcccttgtcgtcggcggatgcgtcgaacaggtcgccgccgaacttcgaggagtcgaagccgttgccggcgatcctgtcgcccttcgcggcgatcaccttgccgtccctgtacaggtcacggctcgcgtacacggcccactggcccgtgtactggtcgtatgcggtgttcagcgggtcgacgatcttccactggtcgacctgcgggtaggctcggccggccggcaggatggagctgtcgagctggtagaggaaggtgcggttgagatacaccgacttgccgtcgatgctttcgccgccgaccttgacggtcacgtccttcttcgggttgatgggcttcaacgggttggacacctcgttggtctccttgctcagatcgttggtgacctggatggccttgttcatcaccgtgtagccgtccttgaccttggagaccttgtacggcatgatcacctggtattcctggccgaggaggttctggtcgatcgccggatccgtcatcgcgtcgagcttgcgggtcgagtactcccgcaggtcggagggctgcgggtcgcccttcacggtctcgccggtcgcgggaatctcggtgtcgacggtcttcgcgaacacgtaggcgacgccgtctttgatctggacgttgaacttgccggtcacgtcctgtcccttctcgtccaacacttcgatcttggtctggtcgacgtccaggtactcgtcgtcgaaatcatcgacgatgccgagacgctggaccttgtatgcggtggagtccttggacaggtgcttcgcgtccagggtcacgacgtagttgccggtgtcgcccaggagcagggtcttgccgtcgatgctgacggtcttgtccttgctggacacgtcctccttcttcggaacgagttccgggggcgtgttgtacaccctgttcgacggggtcaggctgttgttcaacgtgagtccccactggttgccgaccctgtggtcggtcggggccttctcgctcacggtgccctcgaagcggacgagcacgcgcgggttctggcccttgccccagttcgccttcacgtacgcggccgtgaagtcgaggcggaagctgtgggacttctcgtcccacttcgtcgaatactgcttcttggaaatggtcttgccggattccaggtcgcggacctccagggtctgcttgtccggcacgagatactggtcgtacgtgtcggtgaagacgacctgctcgacgtcgtacgcgagctgggacgggagcttcggcgtggtggccagctggtattcgaccttctggcccgggaacacgaccttgccctgcacgctttcctgctcgccgccctggctggcctcggacacgacgtccttcctgaccggcggcacgtagccgcagatcttcggctcgttcgtgctgacggcctggttgttgacgatctccttgcccgcattggtcaacgcgtgcccgtccttgccggcggtgcagaacgtggtctcgtcgccctcggccacgcccatgtccttacggacctgggccgcgcccttgccgttcgcgaagttgatcttgccggggatcaggagcgtgacctgcctggccttcgccatgccggtgagttccttcaaatgggcggccttcgcggtggcggtgaccttggtgtcctcgacggtgatcgtgtactggtcggtcacgtccttgccgacggtgttgatgccgttgacgctggactggtcctcacggtcggcgtccgcctcgtacacgcggatctcggacttcgcgtccgcgtcgaacaggtagtcggcgttcgcgtagtcgtcctcgatctggaaggtggcgagctggtccttgacgaggtccttcgcgacggtcgcgttgatcgcgctggcggccttgtcgccgtcgaggaagacgttgtcgtccgcgccggtcgtgttgctttcggtcgggtcgatgacggtcttccaggtcttggacttggcgtcccacttgacccagcttttgtccgggttcggcttccaggtcgggaactcgtgttcgggcgtgtccttgtcctggctcttggtgacgcccttccaggacacgtggcccttgtccttgacgaggctggtctcgggcgtgtgcacggtcacgtcgaatgcgaactcgaaatcatggtcgtcgggcaggcttccgccgttccatgtggcggtcagcacgttgccggacggtgtggctccgttggcgctgttgaacgtgtaggagccggtcatgtccttgccggcggtcttgtcggtgaccttcaggttcgacacggtgtactgctggccatgcgggtcgaacgtgtccttgaagtcgagcttggtgcccttcctgccggtcttggattcaatggtcgtggtgttcgtcatcgagtccgcgctgacgccgtcgctgatgcgcttggtcggagccgccggtggagtgtcgaccagcggctcgtcctggtcgaggacgatggcgatgacggcgcgtggggccttgtccatctcacggatggcgagactattgatggaagtctgtccatcagagaagaacgaacgggtcgtgtagttgactccctgataggaataagtgttgcccggaatgccggaatcgttgtaggccttcttccactgggcggcattgaaggtgccgttcgcgcccgtgtaccagtcgccggacgcgccgggcgtatgcacgaaacccacggacacgaggcggcagtccgggctctggttgccggaggccttcgcgcgcgccacgcattcgtccttcgcgccggtgacggcatcgtcgatgacttggttcgattcggcgccgtccatcgaccgcacgccagcggacgccatcgcggccttcacgttctcacgggtcggcgcgccgaaggagtccttgtacacccagctgatagtgccggtgccgcctgcggtgccgtcgcccgacccggacccggatccggatccgccgccgccgtcagccgcgaacgctccggccaccggagtgcacagggtcgctgcggcgaccatggtcgccagagcggttttgccccatttcttgtttgtggaacccaatgtcccgtctcctttcagagatttctgcctgcagattcgttccccgcctatgcgggccgggaacgccggatggcggaaacgcgtttcccctccatccaatccattccacgcgcgcacgcctcgatgaggggcaatatcgattcggggcgtatgccgtatgaacgaaaacggccccgtccaaaaatggacggggcctgcgaaggacaaggggaaaatgagtcatccaagtggacagaatttatccggctggcaattgtattgatccccagtattgtcttcccagtcgtagtggatgtcgtcagaggcagaagacgaggaagagcccgcgtttgaggaagagcctccctgggagccgcctgaatacgatccgccggaataggactgtccaccggcggaaccggaccagccgccggacgaatacgaaccgtacgagtacgagcgttgcgcctgcgcctgctgttgggcctgctgtgcggcggccgcctgggccgcggcctcctgttcggcctgcgccttcgcggcggcctcggcgtcggccctgtccttcgccgtcttcgaatcgttcacggccttcacggccttggcgatgacatccgcgtcgcgcttggcgatggcctgcttcaacgcctcacgggtcttctcgtcctggaccttgccatccgtcgacgagtacagtccgtccgcgtcggccaccgtcttgtcgagcttcgacgattcgaccgccctgacggccgactccaacgtcttcgcatccgccttcacgcccttggtcgtcttgtccgccttcgcggcggcctcgtccagaccggtcttgtcggacgcgtcgcacctgaccatgccgggcgtctccaccccaacggcctgcttcaacgcgtcaagggtcttcgcgtccttcacgcttgtcgcatccgtcttcaacgcggccgtcgtggcgtccgcgttgagcagcgccttatacgatttcacggccttcgactgatccgcgacggccgatgcgcacgcctggcgcgccagagacacccgatggttctcgtagaccctgtatccgcacacgccgccgacagccaggacggtcgccgcgacggccgccacggcgatgatgatcggcctgcggtccttcctcgttggaatgtcctccgtgccggccggtggaatggctgccgggacagtgttcttctcttccatgacggttcctccttgatgtcttttcgatatgctcatactacccacataaccccctgacaatatcggcaggggagaagcatgggtttttcggtctggcggcccggaaggaacgtccgcccatggagttcggaatccgggaaacggttgcggatggaaaacaggagtcgcggaacgccatgggagcaccacgtagcagtcaactcagaaggtcgatactccggacatagtggaggcttgttcccggtttcctttcatcggacgtcggtcccttcttcaacgacttcggataatacagtccgttgtcatcccgtcccagaccaagatgccatgccgagccaccgaaatacaatcggacacgactattgcccgactccaccacgagttcggccttatccaattcgaatgcgccggcaatcacatcggccttggctttcaaccagttcgcatcaccggtcggcgcgaccctcttcggagagatacgcttccgcgcgagcagatcgacatacagacgacgtgcgggcaatgaccgcctgcgatggtcgtcggcataataatccaagccacacaagtgagcgaagttctcagccctccaccgtatcgccacctcgaaaccgtcgtcacagacgattcgcgtggtccggccaacgagacactggtacgacagggcggccttgcgcgcctcgccaagcatgcgctccttctccctggtgacgttcaaacccgatcctcccgcgaaaaaagaaggggcgtcgaaccaacgccccttcggaagcagacggcaagtctttttacagtcttctgcgtgacttgacgctcccttgtcagggaggatgaacggcttcggcccgttccggccatctggtccagccgctggacgagacgtcccgctatcgcggatgacgcggccatcgtcatcggacgcctgcggcagcatgccatctgttccggacccgaaaccccgcccacgaccaaaacggggtcaggcttcaaggtctatacgattctattcacagaccatggacgagtccatccaaaggattcataggctcctgccatgtgtgcggacgagcaggtacgcccagaccatcagattcacggcctgcaccaccagcagaatcacatccacgccggaaacagtgccggtccaaccatcccgtatgcgcatgagcccatgacccaacccgtacgagtaggcgagcacgccgatccacccggccaatcggcacaccgagtcgcgccgccgttgttcttccgaacatcgacgggaaccgttcgggatcatgtatggtccgaccagtcggacgcacgccacgagattcagcacgcatacaaggcttttcaacaggttcacccaattcactgaatgtctccttcccaccatccggcgctttcgcgcacctgttccatcagatcctccaacgtggcctgtgccgtacgacgggacgttctcctgcaggcgatcccctatgatgatagcgtcgatgatacgaaaatcccgtatgccgggcgaatggaaggagaggccatgagcgttcaattccgacccatcacgggcagggaggacggggactggttcgacgaggaggaaccgttccgtatcccgccctcgtacatgctcgtggacaacggtctcgtatgggcatggtcgccgaacggatgctacagatgctcgttccggtatctggaaagcgcgatggtgttcacgttccttgaccggtggggataccggcatgaccggatcgtcgcctggaacgtcctggacgacatgggattcctctcacgggccttcaaaatccagatcggcagggaactgtcggtgaggacgaattactcgaaactcatgggggaaagctacctggccgtcaactgttcacactgcggcgccatccagggagtcaacttcatcatcaacgactacctcggcaggggcggcgtattctccaacccgcgatacgattcgatccccatccaggtcaaaagactcccgcttctcacccgggacaagccgggaacgtaccggtgggcgttcgaggacccgttcacgcgcgatgtccccgcacgcaggctcgtggcggaccagccgttccgtttccacccggcccccacgtcacggaatccttcgccatggaaccctcaggcaagaccataaggccatgacgccataaagggcacggggaacggtccggcagtcagcgtccgcgatgccgccaggcgagaatgatccacacgagcgtgttggccgtgaccaatgccagattcacgtaatcgaccggcagcacatcatcatcccacccgaaccgcaggtacatcaggctcttgcccacgccgcacgcgtacaacaccgtcagaatccatcccgcagcacgcagtccacgggccatgcccgtggacgggtcgggaccgtgacggcacgtcggcatcatccaatcgcccagcaccttcacgcacaggataagctccaccgcgtacatgacgcctcttgccagatcggtccagttcatccatgcctccccgttccggcggaacgcgttcccgtcgtcatccgtcatcttcctccgacccctggccggcacgtatggaatccacggtctgttccgacaatgattcaaggatggaggccatgcgatccaattcgtccggatcggccgaccccgcatccatttccttcgccttgtcgtactcctggccgagtctcgtgcgcagatacggcaggttcaggtccgcgtcccgcgtatcgtccaacacgcgttcggccttttccaacgccgtatggaaccgttcgcgcctgtccttgtcggccttgcggcccagcacgtccgacgccttcccgtacagggacttcagggtcctgcgggccttgcgcatccgcgtggcttcaccgtcggccttttccttggccctcttcaacgtcgtattgtcgcaatccgcgtcgcagctgatctccgacacgctcggacggttcctcgccttgacccagcgtcgtgccaggtcctcgtcggccttacgcaacgtctccgcgtcgatgtttgtcccgtaccgttccgaatccttgtcgaacaggccggcctgacggtcgcgtgacagcacggcccgctcgcatgccgtcacgttcccgtcatgcgtcatatccatccgatccacgaggatgatgccgccgacacccgccaccgcgcatacggccgcgcctatggcgatgatcctcaccatgggaaagccgccgggacgacgatcacgacgatcatgcctcccgccgtcatcggtgccggccgcagtgtcatacgccgtcggcatccagtcggcattgaatccttccattcgcgtctcctccttcggggctcgtcgtggattccgccacggaaaacggccggccccgacgctcagagagagaagaaggggaagagacgcgtcggggccggcatccatgcccgaacggagagaaccttcggacacggcctgttcaattatccgaggacgggagcgggggagagaccatgaatggccaaggggaaatgatcccggacagggggaagcgtccggagaaaggagcaggcgtccacggaccggctctcccgtcccgtcatgaccatcacgcgacccgtatccgatatcgtcacgcgaaacgatgcgacggggcggatgccaacgatccacgatcgaaacgaacccgccgataacctatcccagcacgtcggccgccaaccccaacaggcgacggctctcatgccaatcaggcatgttcaatatccggctgaaccattccggatccgtgtcgacgtggatgaaaccaccgatctgacgtccctcatgcaacaggcatagcgggaagtattcgaccatatgctcgccgtccttccgtttggatggaggaccgagcgtgaacgtgacgttggtgaaacgtgtggtggaaacgcgaacgcattcctcggaaaaatccacgggttccaatctgacgtcgtcaagagtggaaagagccgcagcgaccggaccatccttggacacgcattgaccgtacaggtcctgttccggcaatcccatgaacaacatctgcggcaggttgcagtaggtggaatcgtaattcagccatgccttgtcgttccgccataggatcaacgccctctgcagtctcttgatgccaaggcgtattcccgaagcgtgccgccacgcgtattccacccggtcgaaccggtccctcataatccggtacaaggccaatgccgtgggattggacgggggacgacgcgaaccgggatcacgatgatatcccggattcgaatacgagcattccagatacgccgtctcgtcatatacggccactccaggcacgtcatgcccgacgtgtcttccatacgggcgtcgatgaccggcatccagttcgcgacggttcaacccgatcaattggatcggattgtcacattcgggacagaccgcgtacaacctcctatgcccgccctccgcaaccacgaaaggctccatgcccttggtctccatgaaataattctcctgactgatggcaatggccctgcattccctgacacgggtcttgaacacatccatacgacacctccgatggaaccgatatcggttccaatcgtaacgccgtacgatatcgaggaaatggttccggcaccgttagtatctcctggataccttcagccaccattccggtggcagcggtggtatcgcccgctcgcgctcggcgaacgccagtgcggccagcacggtcgtcagtccgatgccgaactcacgatcgccctggcgcatgaggaacacgtagtcctccgtgcagtcgtcgcagtccatgtggtcgatgatccgtctgcgggccagacgtgccagatcgggttcggccgtatcgttcgccattcgttcgctccgtttccgtatgatgtccgggcctatcccggacagaccttccgtcatacccacatgcaccgcagacgcggataggcgatggatgaggcatcaggacacgatcgcctcgccttcccccgcgcggattttgaacgcgcccgtcggaaaagacctccgcgatcggaaaactgagaacccgaaccggcccaataattgtggtacaattatttccatgattatcttcgattccaaatcggcctacaagcatttcgaggaggatcggcttgacgaggatgagatacgcaaggccatggcgcacccggaatggatcgcgctcattgaccccgccgatccatccatcccgcccggaacacccggcaacacggcggcgctcgtcatatgcctgcgccgtcccggcgcatggcatgacgacctgatagaagtgctcgcacgaccgcaaggacgcgacatgctcgtgttccatgtcgagcatctgactgacaaatggcgtgactattggatgaaatggagacgatagcaatgaccgatatctacgaacggttggccgacgaaaacgaaccggcccccacgacggctccggccgcgcagttcacgggcggccgggcttccgacctgatggcctcgctcatggccgaggacgccgatgccacggccatcctcaccgcgctggccggcccgggccgcccgacgggcgatgaaaaacgtgagaaaagcgtacaggaacgcttccgtgtcccggcctcgtggagctcgtacatagagtacgcggcgaaacgcgagggacttaataaaagcagatacctgaaagccctcatcatccaggatgcccgcgcgcaccacgaggagcatcgcctgcaggccgcatgacgcgatggcacgagaagacccacgacgtttgggagcgtcgtggactttttcatatccggggccgtggatttccgggaaaacggccttaggcgtcgagatccgtggtagatgtcgaaacgaatggtacggacgggcgacggaaaggatatgccagatgttcaaatcgaaaagggaactgcgcgcggataaccgccggcctcggtaggaaaacgaagacctgaggaaacagaaggacacactgaaggacgaagtcagtgtgtacagacagaaaatcgaatgcgcgaccgggcatgtcaaccctcttgtaaaaacggtggaggcgttatgcaccaatcctgaatatgacaagtgggataaccatcccgcggcgacgatcctcgttcgcctgtcatccgccagcatctcctccgcatatgcgcgaccgagatggatcccggggagacggctcccatgccagggcgacgttgtcgaactcacgatcgtcctggcgcatgaggagcacgtagtcctccgtgcagtcgtcgcagtccatgtggtcgatgatccgtctgcgggccagacgcgccagatcgggttcggccgtatcgttcgccgtatcgttcgccccgtttccgcatgatgtccgggccgattccggacagaccctccgtcatacccacatgcaccgaacgggtcgaaagacgataataaggacaccggaaacggagaggaacgctaccgcagcccggcatcgtcggcgacggaaagggccggtccggggaaaggatcctccgcatccgaggacgagggcatgggaagatcgtccgtcgaccggtccggcgtaggccgggggatggtgaaacatgtggttccatgattggatgagaccgtctcgtcacggaccgtcacggccgttgcgacacgcttcacgaggctcgacctgatcgcttcgatacggaccggggaaagcatgccgttggccgtcagacggtgggccacctcgtcgggccaatccgccagaacgtcaagatcgtacctcgaccaatccgcgataagacgcagttgacgcaacgccgtaggggtcttataggtcgaatagaacggtttcgtcctgtaatcggcgttgtccaccctcaactcgccggcccacaggctcatccccgtatcgaacaacggggcgggccgcacctcaaggctgtccacgttcctgatcaggccgaaattgttgtaatgcctgtcgatgttacggaccagccagtccacgagaagccaatcgtcggtcgcgtcgctgacggctttgcgcgcgcaacccagcgagaccgcgtccgacagccattgatcccgcatgctcagcctgttgtcacgcttgatggatcccatgagctgccatgcggagatcagttcctcgtcacgggagagcatctcgtcgcacaggctgacgggacggttgtcgtattccccgagccggtactccacggcccggatgcccaatccgcgcgcgagacgtgaggctatgagctcgttgacgggttcctgcccggtcctgccgcccttgacgaggaccctcacaccggacgggccgatggtccaacgtttgggcaggtcgccgccggtggacgcgtccggcacgttgaggctgaacccgtgggacgaggagaccggggtgagcagcattcgcccgaactcctcgtcgaatggattgtcgaagaagttgacgtcctcccaacgtaccgggtcggaagcgtccctgacccaatactggtcggataggctcaacccgtacgaccggttcaggagatccaccgtggaacgcaccccaaggagatccaacgcgcggcggatgccgtcccgtgaggagggaatggcccgccggcgccaccacatgtcgacccgtttcgcgtagaccgcgctcctgccgtgcgtggtcaattccaacggaagcctcgccctgtccaggatcgtgccggtcccgacagcgcaggcgcgacgtcggtcgtaatcgaaggaaagcaccgggcgacgtgcgcacatcagaagacgttcgacgctcatcaaaaccaccttcccgcccaacgggccacgacggacacgaccacatgcctcatactacccgccaaaacccggatcggccccgccctacgggaatctcaggcgtccacaggcaggacgaacggcgtaatagacgttgcgtccatccccgcggaccgacttgtagggttcccttcctcccgtcgtcctcatgaagttcacggcgttgatctcaaacacctcccctagaccagtgcgggccttgaacacgaacatcggacggcggccttccgttatgaatcattgatactggttccttaccttaacccaccagtccgccggcaactcgggcaccgcgccctcgcgctcggcgaacgccagtgcggccagcacggtcgtcagtccgatgccgaactcacgatcgccctggcgcatgaggaacacgtagtcctccgtgcagtcgtcgcagtccatgtggtcgatgatccgtctgcgggccagacgcgccagatcgggttcggccgtatcgttcgccattcgttcgccccgtttccgcatgatgtccgggcctatcccggacagaccttccgtcatacccacatgcaccgcagacgcggataggcgatggaatgaagaacttgtttccgcgggaactgtcacgccgaaatcttcgtaatgctcacggcatcatcgcttgaatcaggaatctcatcgtgagcacgtccaagaggaacgagctcaatcgacaacagctcagatacccaatggcaggatcgtggtcaacgcggcccgctgctggcccttcatcgaggagagcctcatatgccagttcttggccttctgctgcatgtcacggtcgaacacgtccaggtccggcaggcttttcgcgaacagggcgataaagccctgatgatccgtatcgggccagttcgcttcctgttcgagctcacgtagccgctgttccttctcctcacgacgttcgtcgcggttcttctcgcgctggtcctgcagcctgctacgttggcggatgctgctcttcctgttgcgcaggtccgcttccgactggtccatcgtcaacggacgccagatatgacagaacgccatcatgcgtttaccggcgaccaggtcacggatccaaccggcctgcacgtcggtgtcgggccattggtagacccaatacgttctcgcgacgcaggaatccagggtgatgtagtcatgctccttggcttcctcgcaccaggtcaccgtcggatcatccctgttgacgtggacgcgatcggccgcatgctcgggatccgcgaccgtgcggatcagatagcgcaggtcgtccacatcgcaccagtggatgctgccgcgtcgggcgccgcaatccagcaggtcgggcgccatggtccgtttgacgagctcgcccaacgcgatgcccacgctcgcgcgttccgtcttcgcgtgacggttcacgcccgcaagccggtcggccgacacgctcgcgctgatgtagttcacgttctgcaaaggagtgaggatgtcgggcatgcgccacaggtcggccagatcgtcacgggcccactgcggggtcgactcatcccgcagatacgcgggttccgggggagtgggtcccggcaggacgaaactcgtctccttcagttcgacgaacccgtccgtttcggacaggtccttgagcatcgtgttcaacgccatcgcccgggaggccttgccctcgtcggatgacatcgtccactcctcgacgtgcgcggtcaacgtggcggtggcctgacgcttgtcgggatcccacagatagcaggcgcccatgaacggcgtgcctatgacctccacgtcacggccctcgatggcctgcgcccgatcctcggcatgcccatacaggccgagcacgcccaacgggcggcccgcggcgaggggactgtaggcccaacggttcgtaccgtccttcaacctggcccgccatcgcatccagatccacgtccacgacaacaggctcagcccatgcacgcgcaccacgccatacacgatggccagcccgccgacgatcatcagcgggccgttcaatcccatggcgcctcccgcgaccagcagggcgacgcccgtgaccgtgacgatcagctgcgccttgtccaggccgaacagcacgttcgtggccgacagtcgactgaacgacgcggccgggaccttggtcttttcctgtgcaaccatgggaatccgacacctccaaaaaaatatgcgatcatggcatgatccggacaaaagggaaacgggccacgcctaggattccacgtggaatcccgaggacgcgacccgaataataaggaggaaatcaggtcagccgacggtcgggcctgacgggccgccatgcgacggcgtggggaaaccgacgccgccatcgccgccacggcctcccgtgccgccatgcgcgatggcgtcgcctccccggccgccctgtgaccgggactgcgacgacgaactggaatcaccgccctgcccgccgtccgcgccacggcctcccgtccctccggaagcggtggcgtcgcctccccggcctccgggcgcgccgggcacgcccggggaaggtgacgtggaaccggaaccgtcccgtccgccgtccgcggcgggaaccccggaaacgggttcgggctgcggcatgccggacgttcggacatcgaccccgtccacaacggaccggcccgcgtcatcggtgccgggaacacgatccggtgacggcgcctgggaaggcatggtcgtcggcagaccgtcctccgtgccggtctgacccgacgtgtcggacgcgtccgactggttccggccggctgcgtccacggtgggtgaggagtcggaatccgaatgcttgcccttgccgtcggatttgtcgtccttgccgcccagcatgtcgccgatggcttcgcccgcaccggacgcgtctcccctgagcatgccgccgaccatgtccgccagaccggacgtggcgccgccgacgcccgacaggcccgccgtggccgaagccacgatacccgccgtgacctgggccgcggtcttgacggcgccgggaccgaccttgccgccacgctcctgcatctcaccggtcacgttggcgccgatgaaactcaccgcgggcatgacgagacgcggactgaaacaacacatgaacaacgtcgccaaaccgatgagggtgggaaagaacgacgaggagaagttcgcatcgttgttcgcgacgttgagcagtgcgctgccgaccatgaggatcaacgccgacaacggtttgaccagcatcacgccggccaccgcctcgacccatttcaaagcggccgggcgggtggtcctccagccggacatcatgatcggcagcggagccacggcggccagaagaaccaggctcagcaatctggccgcgagcatgcccgacaacgccagggatgcgaaccacacgaggacatagacgaccagccggatcagcatgtcggcctgcgcaccgtatttcgtcgcggtaccgaccagattcgacacgacactgtcactgaacgcgccggaagccgtatcgccggacaactgcacgttcaggatcttcgcgctgactgtcccgacgataccctccaacgtgatcatcacgctcacgctgaccgcggtcaaaggccaggcgagcacgcacatcgcgaaactcttgaccgattcggccacgctgcccttgaccgcggcatgcagcgagccgatgatgcatatcgccatgttcacgaaacccatgatccagccgatacggttcgcggcggtgatcgcgatgttccactgactgttcgacaccgttccggccgtgccggtgaacgcgcccgtgatcatgctgctggccgcgttatccaggggtttgaaaagccagtcgatgaaattgctgagaacggtctggactatctcggacatgcacgcctccccgcgtcatcgcagaaaggtgccgcgaccgtggcacggccacggcgcccatcggattgaaagggcatcatccttttcagaacagcgcctgcgtcgcgaagaacttcacgatcgccatggaactgcccaggatcatcgtcgccagagcgcaccagatgaacacggtgccggaatactgctgcatcggacccgaatggatcaccctgcccatgatccatgcgatcgcggcgcagatccaggcggcgatggcgatatacaggctcatcgcccacaggccgccgaccatgttctgcacaagctccatgaacgggaagaaactgaaattcgggctcacgttcagactcgagagatccgaatcggtcaatccggcggcgacggtcaggaaaccgttcgccgttgtcagggaagagacggcggcgacggccgtaatatggtgaaacatgattcacactcctttcaagcagacccacgccgagcccggacatagcaagccgataatcggataggagggacggttcaacggtcgccggacgatccgccgcccgaaccgttcgtcttcttggaagaggtcttcttggatgccggcgacgaatccccggaggtgtccgaaccgttgccgaacgcctcgtcccacgtcttcttgatgtaatcccaacccttttggaacacgttgccgtcaccgtcgccgcccgtaagccacttccagccctccaacgacttcttgaccgtggacgacacggcatccttcaccgtgtcgccgatggaggaggcgatgtccttgccgagctgggaggccagggaaccgagactgtcgctgcctttctcccgaccgtccttcaacgcgtcgctatcgaccttccgtccggcgaccgaatacgaggtgttcgacttcaacccatcgctgccgaacaggttcgcgctccacgcccaaccggtacacgccgcaccgatcgtgaagggaaccatgagcgcggcggccagacgcttccaagagaacgcccgttccatcatgttgttcgtgatcagtcccggcaccatgctgatgcatccgatgacgatcacgcccacggcgaggacgagcgcgaccgcgacgacgccgccgaccatgtcgcgtacgccctggacatcccaggaagcgtcgggcaccagtcccttgagctcctcgtccgcaacgataaccatgccgatcatcatgtctccttccatatatgtcagtaccagttccgcgtctgccagacggcccacgcgccgcaaggcgtcttgtatcgttggaggatgtaatccaaaccccatttgatctgcgtcgaggcattgtcccgccaatcctgtccggccgacgccatcttgcttcccggcaacgattgggggatgccgtacgctccggacgacgtgttctccgcgttccaccgccaacccgactcgcgggtccagatccgcaccaggcactcatactcgtcgtcgtcatcccacccataggccttcatcctgcttctggcgatcttcttcgcgtcctccgcgctggcatgcgtgccgtccacgtcaccgtccgaaccggacgacgacgccacgcactgctccacgtcggacgagcccgccgtgccggcgccggtgatcttgccgtcgggcagcacgtaggtgccaccgttaacgatcggcatcgtccgtgaatacaccttgtagccggcacccttctcgctcgtggtgatggtgcctttcgcggtgtccacggactcgacgacacccacatgaccgtatgtgggatccgatccctgcacgccggccggccagctgatgatcgcaccggcgacgggagcgtccttggtgatcctgaaaccggccttcgcgccgctcgcggcccagtcctgaccattgccccaataccggcccacacccgtccagccgagtttcttcgccctcatgcacgtccaccaggtgcactggccgtacgcgtaggtggcgcagaaatcgtccgggccctgccggccgtcgaaccaggccatggcatcccgttcgctcatgccgaccagttcggtcgatccggtaccgcccgaaacggcctgcccgttcgacgtgcccgacgatccgatgatgttgcccgtacccttatagcggaaataggcggtgtatccagccgcatacgaggtgacgctgatctcgtcgccggtctggtccccggctttgcctccgctgatgccaccgttctcgtcctgatgggcgccaacgaacctgccctcaccgatgtagatctccgtatgagcggactgccagaccacatcaccggtctgcaggtcggcgaccttggtccagtcatgacgttcgaacccggccttctccaatatggccggctcgccggtcgtgttgaacgcgtaggagccgacgtccaatcccgcgttcttcaacgcgtagtacaccaggctcgaacagtcatagtccggatcgccgttacgattcgactggctgtacccgtgggaatcgtcatccgcgatccgtttcgcccacgccacccatgaagtcgatgacagcgaatccgaaccgcaggtcgtgccatattgcgattggaccaacgcgaccaggatcgtcatcaatgacacgacgattaccaacgggatcgcgaaaaccgccaccggcgccacgataccggcgatgaccatggtgccggcgccacgcccggcgttcgaagaagccttggatccggccatgagatcttccctcccgcacgacgacgaacggccccgtgggatggaccctgggacgcggcccgacgtgcgccgatacgacaacaacgatttacaaccaaggtcacgcgtccgaagaacggaaagcggccgataatcggccgaacggggattttcgaacctaggagccggaaccggccaagggcgagaggatgtccaggatcagactgagtttcctgccgagatccgaatcggccggatcccgtcccccgaacgaaccatcggccgcacgcacgtcaaggatgcgctgcaggccgacgctgccggacaccatgccaccggtcatgcgattgacgacctgccgctgatgttcgggcacggtacgtgtgtagtgacgcaccacgacctcctgggtcgagtcgccgatgctgtccatcgcctcacggatcgtgccgccggattgcatcaacaaagtcgtatgggtcaccctcaacgtccggaacgtcgcggtcgggcatcccgcaacctcacgcgcccgacggaaatggttgcccaacgtctgcggcggcaggatcatgctcctctttccctggaacacgtaagggcttgactggtcgcgacgcgtccggatatgctcacggatcaaagggaccagcagatcgggcagcacgcacacccgtttcgaatgatcggacttcaccggccccaaccgcaacggtcccgaatcctgatcgccacgacatacggaatggttcacgctcatggtccgcgcctcgaaatcgaaatcatccaccgtcaacgcgcacacctcaccgatcctcatgccaccggcccacgcggccagcaacacgctcaaccggtcggattccggcatcgactcgtacaaagccgccaactgcacgcccgtcaacggcggcacgctccatgacttcggttccggatccggcggtatcggcaacacgaacggattcgactccaacaacggcatacccgtaccgaacctgtccgaacaggcgatatccagaatcgccttcaaccgttgacaggtccggggaaacacccacgcaccctcgtcatgcgggccgaaataccatttcgagaccacctccggggtgatgtccgtcagacgcatcccgccgaacacatccttcaaatgctgcacatccgtcttcaggttacgtttcgccgcgcccctcaacgcggtcccgtccggtttgcgatgcgtgtcgacgtaccagtcggccagctcgtcgaacttcatgagggaagcgcgggcacgccgggaacgcgcggtggggtgcacccatttctgtacgccgcgccgatgcagattgacaagcatctcctcgccgttaagccaggcctgcgcatcctccgaggtcctgaaggaacgctgcacacgccgcgagggatccaaaggagacgcgtagcgagcgagccaggaacctacgcttccatcggcccttttccttgcgatcactgtgccgaatcggcggcgcctatccgcttccatccacatctccttccagggattccaattcgagaccaaacccggaatccctggaatagtgcacccgaattggaacctatcatcacgagatcaggggaggcttcttcgcctattctctcagttcgggcttattatccgtccctctcatagggaatctcgcgagtgtccaggacgctatccctcgagggtctcaacgtgattcccgctcttctggaactgcagatgcagccagagcaggatgagaatcatgagaatttggttcgagtcccaccgggggcaccatcgcgacgaaggatcgcggccgggcaacaccggctgaggctgttccgttgttcccggcctcgggcctgaccggataaaggggtgtcccggcgcctacgggaacgccttgccggtcttgatgcttttccattccgagctcattcatgaacgcatcattcatgagctcgtcgggcgtggcgtctaggaaattcgcggcattgaccagatcggaaacggaccaggcgcttttccccgcgagcttcactgagattgtcgatcttttcacaccggggaacatgttcgagacccgccctcgcggtgtgggcgtcggcgggatcatgcgtgtcaccacggccacgagtgccggatgtccggatgacggattcctttcggaattcacccagtcccgccgtcacccggacggggacgcaactcccgtcggattgaggaacggcatccggcacgaacggtccggtggatggctggtgtagacttttcgggagaggaacggtcccgccgccgggcgggaactccattggaatcaagaccaggtgacgcatggacttctatgacctcgactacatcgtctcgcatcagtcttccgattcggcgctgcgcgtggccgcgatacttgtcctgctcgtgacgggcatggtcttcggcgtgctctacctacgcgacaggatacggacccggtggagggacgtgggagtgggcgccctcgtcctctcgctgatactgataggcgtgcaggccgaacaatacctccaggtgagtaatcggatatcccagtcccaactgctcgtgagcttcatcaagggcgtcgccaaggatcagcgcgttccggaggacgaggtcctggtgaattccacgagcctgaaggacggcatcatcgtgcgtttcaatgaaagggattacctcgtccacctcaacgacgacaacaactcctacacgctcgaacggacgcacatcattgatcacaatgtctacgtgaacgggaatcgctgacatgggtttctatacattgacgatcatcaagttctcgctgggcatgctcgtgatgatcctccagatcaacattctcgggaaacgcgaattctccctcaataccccgctcaaccaagtccagaactacgtgctgggcggcatcatcggcggggtgatctacaacccatcggtcacggtgctccagttcctgatagtcctcctcatctggtcgcttgtcatcgtggcggcgaagctccttttcgggagcagcgggacgctcagacgggccatcgcctgccaacccgagctcctcgtctgcgacgggaaggtggacatcgcccgatgcgcgaaggtcggcctcaccgcggaacagctcagtgggagcctgcgtgagaagggcatccccagcgtggcggatgtggaggcggccgtcatggagaccgatggcaggctcacgattcgcgtggccggcacacgggatgggagcccgctgctgccattggtgagcgacggacatctggtccgtgatggtctgaagcttgcggacagggacgaaacatgggtgacggaacggctcagggaacaagggtatggctcggtgaggcaggtcttcctagctgaactcgtggatgggagccttgaagtggttccgttctcggacgcggcacgctcaatggcctagttcccatcgccatcacgcgggtcccatccacatgaccgacggcccacgcaaaaacgagtggcatccgcactttggcgatcgtgttttagaaaatcgccggcctcgccgccggccagagcagacaggtaaatcgcaatccgtgtgtatgcgggtgtcgcaacgtatcgcatccttaatgttttgccgtccactggtcggattcgccatgattcgggttgcggatccggtggaatgggcagcatgaaaggattcgtctcgatgagaggagaggcgccgtcgcttggtttcgtggcttcttccaggattgatttgagtcgttcgcgttccttccaaggtctacgaggagcttttcctcctcaagccagctttgtgcctggatcctgccgtccttgccgaatgagcgttggcatcggattcctttgtaggtgtatcgtccgatccatgtctgggtcttgccgctggggtgccttctgagcagcacggtcccgaattggcgtctctttttcctcttctctgtcatgcggccgtccttttttccggttatagaaacagcccgtcggaaaatgtcatccttgggttaatgtgtcaccctaggagacgccttcgcgacgggctgaaacggggattcaggctcaggctttgtaagagatgcgtatgcgggctgcgatcgtcatgctgtaaagcagcaggagacaggcggggtctgggatgatggggtccgactcgtcagtctggcctatggtcatgggttcgagttccgccggggcacctgaaacgacgaagaatcgcggataggccgattgggaaatgatcgtgtccgcgagatttcgatgattatggacgatgcatatcctccaaactcagcgcaggtgatggttttcgaggaatatgcatgtgctggatatcgcatgcgaagatgaggtggactatctcacacgcttaagcgtttttggtgtaattcttcttgaaatagtatcatgttgatgtcatattttcagtttcagtacgtgtgattgcggtacgggagggcctgatggatttgttcgttcatacgctcgtttccgggcttgtccagtttgcgctggccgtgctcatcgctttcgtctggtggtggtttagcgcgcgccatcagcggcggttcactcaatggatcggtcttacgaggattgtgggcgggacgaagaccttctcgttcatgctccttacgcttctgatcctgttcgggtgtggctggcttgtcattcaggtgataccgagtacatatacctataccgcgtccacgcaattcggaggtttgggatgggcggctctgccatccgttctcgtacatgcgttgctgaacacgtcggggtgggaggagatcttcttccggggactcctgttgaagcgtctgatgggcaagtgcggactgctcgtcgccaatgcccttcaagccgtcctgttcggtcttatgcatggtgtccctttgtttctcatgacgggaatgagtgtcgttcaggctgccgtcatcaccctgtttaccggattggcgggctggtgcatggggtatatgaacgaaaagcatgcgcaagggtccatcttcccgagctggacggtacatatgctgtccaatgtggcgtcgggaacgctatccgccttcaacatgctctaaagcatgggcatgacttgcaaaggtatggaagaatcggcgcatctcattacgtagcaggatgggaacgttcctccggcgtccggcgactgcgtcatgttggaacgcaagcgcagacttggtttacgcgacacgcatatataggcggctgctattatcatttcagaaagaacaaggaggcaggctggctggagccgtctgctgccggctttatgcggattgaaccagagccttgcggaggtggtgttcgagtcccgttcggggcgcgtgacacacgtcgaatcaatccgggtctaggtgggattggcatcgagccgggcatgggtgcgatagtgaaaagagactgatatggctgcaaggaagaagaccactgattcggctgaagtgagcgaggtgctcactgacgaagagctcaaggccgctgcggagcctgaagaggcctcaaccaaggaaggcgaaccgcataagcgtaccgttgtggtggccgaagatgaatcggtgaatcgcatggatctggtcgccatgcttgaagacaacggctacgaggtcgtcggtgaagcggccaatggtgaggaggccatcgaactgacccgtaagtaccgtccggacgtggtgtgcatggatgtgaagatgcctcgtaccgacggcatcaccgcggccggtgtgatctgcgatgagaacatcgccccggtcgtcatgctcaccgcattctctcagcctgatttggtcaagcaggccaccggtgcgggtgccatggcatatgtgaccaagccatatgaggaatccaagctgctgccggccctcgaagtggccatgggtcgctttgctgagatcaatgatctgcttgacaatgtggagcgtagcgaatccaagttgcgcgacactgaggagcagctcaagaaggccgaggaacagcttaagaaggctgaggagacccttgaggaacgcaagcttgtcgatcgggccaagggcctgttgatggacaaggcggacttctccgagcagggcgccttccgttggattcagaagacctccatggatcagcgcatcccgaagaagcgtctggccatggccatcatcgccaagtatggcgagcagaagtcggaagcagaggatgagcgctaacacagcaactgtggaaggcacttcacgcggaacgctattggtcgttgatggccattccttggcgttccgcgctttttttgccttgcccgtagagaatttcagcacttcggccggccaggccaccaatgcggtatggggcttcgccaccatgctgtcgcaggtgattgacaccgagcatcccgaccatttggcggtggcgttcgatgtcaagggcggcaccttccgaaatacgatgctgccgcagtacaaaggcacacgggatgccgctccggaggatctgctcagtcagctgccattgattcagaggatgctttccgccctaggagtcacctatatcgaacagcccggctatgagggcgacgacgtgattggcaccttggcgaccatgggagacaaggccggataccgtacgttggtgctttccggcgaccgtgacgccttccagctgatcaatgacaacatcaccgtgttgtatccaggtcatcatttcaaggatttgaagcatatgacctctgaggcggtggtggaaaaataccatgtcacaccggaacagtaccccgatctggccgcattacgtggtgaaaccgccgacaatatcccgggagtgccgggcgtgggtgacgggttcgccgcgaaatggatcaaccaatatggcggacttgaccaaatcatcgagcatgccgacgaaatcacgggcaaaaaaggcgaagccctgcgtgagaacatcgaacaggtcaagttgaatcgttccgtgaatgcgttggtgcgggatctcgaacttgatgtgactcttgacgatttgacgttcggaaccgttgacaccgcgcgactcaatgacttgttctccaaactggaattcggcattcgcaccagaaatcgcgtgctgaagaccttcaatgcgggcacgacgacggcgggcgtcacggtccagacggagtccaatcgggtcgtgctgccggaagtcatgacgattacccatggagacgaactgcgtacatgggtggatgcgaacatgccaccggccgatgaacatctgcatggggatgatgaggatgcgaatccggccattgatgccggatccctcattgagaacaccatgacatgcaccaatgccgtcaaccactcctgggtgctgcaggccgaaggcgtggccaagccaggaaacgcaagcatggcttcactgatgctgatggtgaacggcaaaggtgcccagatcgagcatgtcgatgactcgattgcgaacgaacttcagcatatgctcgacggataccatcgttctatggtggtgcatggctacaaggaacagcagcatctgctcgaatccgtcggcatcaccttgcctacgccgctgttcgacaccaagctggcgggctatttggtacacccggatttccacgcggaatcgcttgaacaggcggccggccacttccttgacctgcacttcgaggagcagtcgtccgaggccacgcagggcacatttgatctggatgatatggacggatcctcgaatacgcaagccgatgaactgcaacgtcatgcggccatcgtcgacatgctggcgaatgtgctggcggacctgctggatcagcgtgcacagttcgggctgctcaagtccatcgaattgccggtatcgaaggtactgtatggcatggagcatgcaggcgcccaagtcgacatgatacgtttgaccgaaatgcgtgaccagttcgccgccgatgcgcgtcaggcccaggagatcgcttgggaaagcgccggcgagcgtgtgaatctgcaaagccccaagcaattgcagaagatcctgttcgaagacatgggcctgaagcccacgaagaagaccaagtcgggctcctacaccacgaatgcggccgcactgcagacactgtacgagcattccctcgataatgaccgcgcgaaccagtttctgggagcactgctgaggcaccgcgaaaccaacaagctcaagcagatcgtacagacgctgatcgacgccacgaaccctcgtgacggtcgtattcacacgacgttcgagcagacggtcgctgcgacgggcagactcagttccgtggatccgaatctgcagaacattcccaatcgcaatgcggcaggccgggagattcgctcggcattcgtgccgggggagggatacgagtcgctgctcagctccgactactcgcaggtggagctacgtatcatggccgatctttccggcgacgaggcgctgattgaagcatttcgttccggtagggacttccacaaatatgtggccagcctggtctatggcattcctgtggaggagatcacctccgaccagcgtagccacgtcaaggcgatgagttacggtctggcctacggcctgagcacctatgggttggctcagcagctcaaaatctccccaaaagaagcggaatcattgaggaaccagtacttcgccactttcggcaaagtacatgaataccttgaatcactggtctccactgcacgcgagaaaggctataccgaaacgatttatggtcgtcgccggtatttccccggattgaagtcaccgaatcgtgcggttcgtgatgcggccgaacgtgccgcgttgaacgctccgattcaaggatcggccgccgatatcatgaaaatcgccatgattcgtgctgcggattccttgcgcgacgcgtgcctgaagagtcgaatcatcctgcagattcatgatgaactcgtcgtggaaatcgctccgggcgaagccgaacaggccactgcattggtcaggaacgcgatggaacacgccgttacgatggccgtgccgttggacgcttccacaggtatcggttcggattggcagcttgcagcacattgatcacagcgaggaagggaatcattcaatggcaaccctcaaacaggtcgtcgacgtattggaaacgctgtatccgctacgctatgcggaggaatgggacgaacccggtctgattgtgggcgatcttcgacatgaagtctccaatatcgcatttgcggctgatccttccatggcggtgatcgatgaggccatcgtcaaccacgttgatctgctgatctgccatcacccgctgttcttccgttccgtgcatgcggtttcgggacttggattccgtggtgaaatcgtacgcaggctcaatgaggcgggatgcgccctgtgggtggggcatacgaacgccgacgcctcatatcgaggtgtcggtcaggcggccgccaatatgttcggtttggaagatcagcgcccgctggtgcccatcgatgatgcgaaggccgagcatgcgatcggattgggacgcgtggggcgtttgccggaaccgatgcctctgcgcgatttcgcccgtcgtgtggcggatgcgttgccttataccgagctcggtgtacaggtttgcggcgaactcgatgccccggtgcgtacggtggccgtgcttccaggttccggagactcgctgttcgacgaggttcgtgccgcgggagtggacgtgtatgtgaccagcgacctacgccaccatccggtgacggatgctatagaacaagcccgatacgaagcctccatgcgtgctcagggagtgtgcatcggccaaggcgacgaccaggtacgtcccgcgttcatcaatacgccgcacagtgccatcgaatcgatgtggttccagtatgctatgggcgacgtgccccgtgccgtagctgaaaccaccggcgacattccggcggtgcgatggatctccatgaacaccgatccatggaatctagtgctaccgtcaagcggtcaggaacgttgaatatgaatatcgacagcgtgaacaaagcgctggagcgttccggagacggtgtcgatatggaacgtccggtcacggtggtgagtcgcgagctggtatatcaaggggcgattttcagcgtcgaggatatgcggcttggactccatctgcaccacggcgggcagacggtaatccgcagacaggtcatgcgccatgcgccttgcgtggtcatgctggtgcatgacctgaaacgggacctgtacctgatcgaacgggaataccgtgtcggcagcgatatgtttgcttacggccttcccgccggtctcatcgatgatggcgaagacgtcgaacaggccgcgctacgtgagctcgtcgaggaaaccggtgtgaggcctatccatggcgacgacatggcgttcgatcatgtgggggagttctattcatcggagggcatgaccgatgagctggcccacatcatgatcattcatcttggctcctggcagtccgttgaacggcatttcgatgccgacgaacatgtcgaatccgcgtggatcacctgggagcagctgcggaggacgcgtatcacggcgtccaattccatgattgcgattcaatacgagcagattcgtagaatgaaggaaaacgggcgataaaatttcaagtcgcactacaatcgccggaaaaatcgcagataaaccggttccgcccgaagtcgtgagatacttgaaggtatgcaaatcagacctggttcgatgtatccactcggagcaagctatgacggggcgggagtgaacttcgcccttttctctcaagtcgcacagaaagtggagctctgtctcttcgacgaagaagacaatgaaacccgcatcgaaatgaccgaacaaaattcttatgtctggcataactatctgccgggcatacagcccgggcaacgatatggataccgtgtctacggaccatacgacccgtcacgcggtctacggtgcaatccgaacaagctactgcttgacccatatgcgaaagccatcgaaggcaacatcgacggcgacgaaagcctgttctcctactggttcagcagtcccgacgacctagggaacatgaacacgctggactcgtccgcacacaccatgaaagcggccgtggtcaacccgtatttcgactggggcaacgaccagcatccgaacatctcataccacgattccgtcatctacgaggcccatgtacgcggcatgaccaacctcaacaaggacgtacctgcggatattcgaggcacctatgccggactggcctatccgtcggtcatcgaataccttaagaaactcggtgtcacggccatagagctcatgccgattcaccagttcgtcaacgacagtttcctacaggaaaaaggactgagcaactactggggctacaacaccatcggcttcttcgcaccgcataacgcctactccagttccgggcaacgcggcgaacaggtcaacgaattcaaatccatggtcaaggcgtatcatcgcgccggcatggaagtgattctcgacgtggtatacaaccataccgccgaaggcaacgaccgtggccccaccttgagcttcaaaggcattgacaacggttcttactatcgactcgtcgacaacgacccacgacactatttcgataccaccggcacaggcaactctttgctgatgcgctcgccgcacgcgctgcagctcatcaccgacagcctgcgctactgggtcaccgaaatgcacgttgacggcttccgcttcgacctggcagccacactggcccgccagttccaagaggtcgacaagctatccgcattcttcgacatcgtcgaacaggatccggtcatctcccgcgtcaagctcatcgccgaaccatgggatctcggttccggcggctatcaggtgggaggcttcccgtccagctggtcggaatggaacggacgctatcgcgattgcgtgcgtgatttctggcgctcgcagccgtccacgttgccggaattcgccagtcgactgatgggcagctccgacctgtaccagatgaacggtcgtcgcccggtcgcctccgtgaacttcattaccgcccatgacggctttacgatgaacgatctggtgagctacaacgagaagcacaacatggccaacggcgaaggcaatagagacggcgaaagcaacaatcgttcgtggaactgtggtgtggagggccccaccaccatcaaggacgtgaatgacctgcgccaacagcagatgcgcaacatgttcgccacgttgcttctgagccagggaattcccatgatctgcggcggcgacgaggtggcgcgcacccagcaaggcaataacaacgcctattgccaggacaatgcgatttcctggacgaattgggatttggacgacactcagaaggacctgttcgagtttgttgcgaagctaattcatctgcgtctggaacatccggtgctgcaccgccgtcgtttctttaccgggcgtgagcctggcgatgccagcagcatgattccccaagtcgaatggatggatcataccggttccatcatggacatggacgattggtcgaatacgcacgcgttctcggtgatgatctacctgaacggttcggacattccggaaaccgactggtatggcaatcagatggtcgacaacgacttcatcctgatcttcaacgcacattacgagccgatcatgttcaccctgccggacgagcaatatggcaagaaatggcgtctggtcatcgacacgcataatccgaagggaccggagctcaactatgaggccggtttcgcgatcaccgcgcagtcgagaagcttcctgctgctcatgagcgacaagaagccggataagaaggtaaacgagttctaacgtttgccgcaggcaaaggctgtgggccacccatatccaacatgggtggcccactacttttgatgcggccgatcagcgttcagaggccagacgtgaggttatatccggaacaactgcattcgcctcgacgatgtcctcgacgttcttcggtccgctggtctgtgccagcaccagctgcgtttgcacgcgatctgcttcgatggcggcgatctggcgggagaagataatgaaccagccgaggaacatcagaccggccaatgcctcgacgttcgtcaacgtattatgcccgctcatccactggaatccagcgaaagcaccgacggcgatcgcgagatccgacacgacatacaccgctttggaaagctgcggggcgagccaaggcaatcctatcaacagtacgctcatcaggcaggggagtcctcgcgcgaacacgttatgcagaatcggatgcggcgtataccgaaacatgccgataccgatgaaggcgacgcccgccagcgtcagcatgaacgccaatagcaggattcgtattttgaaatgcctgggggattcgtcaagcccggtctgctgcgcatactcccgacgcagtcgattggtggtgatcagctcggagatggcgaagtagctgataatgacgatgcagatgccagccagcatcagcgtggagttgaacatgcgcgccgcgaacgtggtgcggtcacccagctgggagaagttgttgttataccaatacggatcgtccgaggtaagtccggcgatgcttacgcccgacaccacgaagaacggcaacaacgcggcgatggttttggcatccatcagttccgcttgcacgaaggtaatgtaacctacgatgcctgcaatgccggcgcagagcatcggcagatagccgttaagcgtacgtgtgcccatgatgctgttgatgatggaaagcatcatgaatgaggtgacgaagatcgtggaggcgtagaccaccgagagggccaggatttcgaatatacggcggatggggaccatccagccgtgtttcagcgtgagcgaacgggacttacgcgcatagcccaagctgaaggaaaccacgccgcaggcggccacgatgccggagcagatggtgaacaggcgctggctgacacgccagatggccggggcgtactgcgtgtacagatccatggcgaaacctgcgaccacggcgcaaatcatgaaggagataatgccggaggtctcggcctgttgatgacgtcccatatctgccccttcatgctaaacactcgccattctagcctgtcgttgtccaaacatacgctacaatggttccttgtgctcatgcgctaattgcgtttcgtgcacgaacgggctgtagcgcagtttggtagcgcgtctgctttgggagcagaatgtcgcaggttcaaatcctgtcagcccgaccgaaagcccggaattccaacaattgtaatacctaggattccgggtttcattgtccttgggtacagtggggcacaatgaccgcgcaacctcctcgattgcagtcatccgttccgtgctcgcggaacgcaccgatctcgttcactatgtcatccaaggcgagacgaacacgatgttttccgtgggctttggctacgatgggggacatgaacgcacctcaagagaacctgtggccggcaccgttcgccggcaagcccctgaacgccaccgtagtggtgccgggcagcaaatcactgtcgaatcgttatctcattctcgcggcgcttggatccgcacccgtccgtctggtcggcttgctgcgctcgcgtgacaccgagctgatgatggacgcgttgcgtgcgcttggagtacgttgcgagatcgatgccgctaccgatactacggttacggtcgttccgcctgcgaatgatcggttccgaggcaatacaagagtattctgcggtcttgcgggtacggtgatgcgcttcgtgccagggcttgcgatgttcgccgacggtcccgtcgactttgatggcgacgagcaggcgtacgcccgtccgatgaagccggtgttggatggtctgcaacagttaggtgcgaccatcgaataccacggtgaggaaggccgtctaccgttcacgatcaccccgcctacggttgacccggccgcacgggcgacgccgagcgtggtctccatcgattcgtccggctcgtcgcagtttatctccggtttgctactggttggctcgcgtgtaccgggcggtcttgagttgcatcacacgggggagaagaccccaagcctgccgcatatccgcatgacggtcgctgaccttcgaggttccggcgtgagcgttcaggctgacgaagaggcacgtgtatggaccgtgcgaccaggcgccgtacagttgccgaatgcggtgaccgtcgaacctgacttgtcaaacgccgcgccattcctgggagccgcactgattgcgggtggaacggttcgtgtgccgcattggcctgaaaacaccacgcagcctggtggactgcttcccggatatttggagcgtatgggggcgaaggtgtcgttcctttcggagaacggaatccgctactgtgaagtgaggggagacggccatatcaaaggccttggcgattttgatttgactgcagccggtgaaatcgcaccgtcgcttgccgcagtgttggtgtttgctgatgagccgacccgcatgttgggtatcgggcacctgcgtggccatgagaccaaccgtttggaagcgctggtcaatgaaatcaagcgcataggaggagaagcccgtgagctgtctgacgggttggaaattgttccggtgagtagcgaaaacctcaaaccgtttgaaatggaaacctatgccgaccatcgtatggctacgtttgccgccatgctgggcctgcgcatcaagggaattcaggttcataacgtagccactaccgcgaagaccctaccggatttcgtgaacatgtggaacggcatgcttgcgtgaatggctcagggcgttccaatagtggttatgccggccaccagatgcgggtgagcggaaggattgagcgggtttcttcgtcggctttgtcgtagacttcaacatagtggcgtacgaacgagtcaagatcgagcagacgtatggggatggtggctcggtcggcttcgtagcgggcttccttggtgaagccgccggtagacacatacaggccgcgatccccggctcgaagtccgccaatgaacgagcgtaccgccggagcgcccatggcacctttgcggtgtttgacttcggccacgatgcggggagattccaatcccagcgcgtcaggcgatgccactacgtcgcggccgccatcggggcctttgggcgtgacacgtgcacagtagcccatggccttgagcagacctgctaccaggcgctccatatcttcccacccgacttggtttacacgatccttgatgagttcgatgccattatcgtaagtggcggcacgggcatcgtcatctgctgcatcgtcctcggtttcgtcgggttggctgctcgtttcgctctttgatgctgatttaaggtccgctacgacttcatccgatatggagaagatggtctggatgccgccaagggagttcttagacgatgttgtgagcgcatcgcgttgggcggtctgcttccatttgaccgctcgcgtgaaggttgcttcttcgatatcggtggcaggtttgcaagggcctgcgatggtgccgatatggtaaaggcgtgtctccgggtcatacatgacgacggtcgatccttgttccatatcatgagcaaaacggtagatctgtcccactgcggcggccaatttgttcttgctgtcgttgggatgtttgattgcgtaaccggaacgaatctgttcccggctcatggaagcgatatcggtggcgccaaagtcccaaccgatgcccacaagtccgcggttgagccagtccgccgcgtatatgcctcctctgcccgcacgaatcatccaagagctcatgattttccccctccaagctaatttacatatgtattattccaccgtgctgcatttcttaccgtattgaatggcgtggtttgtcgggctgtggcgggtgtctgcaatctgatggcaacggcaacgtctgggctatcattgcactccggcgaaaccgcgtgcctcaaccgcaacttcgtattggctacggtcagcgggttcatcgtcttatttgccatgatggccgccatgtcgcacctgtctacctatccccaactagcgcacggtattatgggtgccaccgcggcggcctccggttatggcacgcgcgaatgctacgtgttctcggcaactggcaccagggatcttgcgtatcaggctttgacagcgcagataaaatgcatgaaaacactggcgaacgcttttgatgcaatgtctgttttcgtggtttgaaaagagttgggacctatgtcccacgacatgcgcccatacgggccgtaggggcattctctcttcacccgtgcttttttaaaatcgggataacggagtagctcgatgatgagaagggagacagccatgggtgtagagagcgtcaattaccagtgtccggcatgcggaggccccctacgctacgacggtgcaaaggcgctacttgtctgtgaccactgcgactcggaatttgcgttggccgatatcgaggcccgctatgcggccaagcaagagagcgcggaagagagagcccaagcagttgcaggcaacgctggcggtgcggcgcaagcaggggccgcaactgaagccgagagccttaacggcgcctacgtgtgctcgtcttatgcagccgagcttgtctgtgatgatacaaccgccgtttccgagtgcccctactgcggaaaccccgtggttgcggctgggcgcttctcaggagatttccgtcccgatcttgtgattcctttcaaacttgatcgcaaggcggccgagagtgcattggccgagcactacaagggcaaggtgttgcttcccaagagttttgccggcggcaacagaatcaaagaagtccaaggcgtttacgttcccttctggctcatggatgccgacgctgcgggctccgcgacctttgaagccacgcgtacgcgtcggcattatgagggcgatgacgaggttatcgagaccgatcacttcaacgttgagcgtgagggctccgtatcctttgaacgtattccagtggatggctcgagcaagatgcccgatgcccacatggatgccatcgagccgttcgactacggtgcgcttgtgccgtactcggtggcctatatgccgggattcgtggcaaaccgctacgacgaggacgctgagacctgtcgcgaacgtgcggaaaagcgcattgatacgagcgtgcgccaagcgctcgagaactctattgaaggctatgacgacgttacgtgcgatagctgcgaagtcgagaaaaactgggctgatccggtctatgcgctcatgcccgtctggatgctcggtaccatctgggaaggcgagcagttcctctttgccatgaacggccagacaggtcgtttggtgggtgacctgccggtggacaagaaaaagcgtacgttcataggcgtgagtatttttgccgctttcttcctcatctgctttgccgcggtcaacttcggtggattccttgccgagaatgcagcggctttgcaatggggcttcatgctcctcactccactgttggtggcgcttatcgtatgtgcggtgctaacgggtcagatgaaaagcgcggtcgaagcaacagaagctgaccgttaccttgacgcctcttcgataaacatcacgcgccagctcgacacctttacgcataccaccaccaagcgcatccatcacgagaaaaatgaaaaggattaatcgtttgacttccggttcgtcataacgaatgcgagctcggggtcataagttttgacgaaacggtttttcatgaaaggagaagatcatgggacttctgaaggcaggcgtcggggcggctggcggcgtattggccgatcaatggcgtgagtacttttattgcgaggctctggacgccgatacgttggttgccaagggtgagaagcgcgtcggcaagcgcggatccaacaccaagggcgagaacaacgttatctcggacggctcgatcgtggcggtagccgacggccagtgcatgatgatcgtcgagaatggtgcggtggttgacgtctgcgccgagcccggcgaattcgtctacgacacgggtactgagccctcggtgttctcgggcaaactcggcgacatggtcaagaaatcgttcgaacaggtggggcgccgctttactttcggcggggacgctggcaaggatcagcgcatctactacttcaacaccaaggagatcgtaggcaacaagtacggcaccgcaagccctgtgccgtttcgcgtggtcgacgagaaaatcggtttggatgtcgacatcaccgtgcgctgtaacggcgagtactcctacaagctggtcgatccgctgatgttctacaagaacgtctgcggcaacgtcgagagcgcctatacgcgcgatcttatcgactcgcaactcaagagcgagctgcttacggccctgcagccggctttcgcccgcatcagcgagatgggcattcgctacagtgccgtgcccgcccacaccagggagctggccgatgcgctcaacgaggaactttcgcacgagtggaaggagcggcgtggcatcgagatcgcggcctttggcgtaaataccatctcggcgcccgaggatcaggaacagatgattcgcgacctgcagaaggcggccgtcatggccaatcctgcgatggcggcggccaacatcgcctcggcgcagagcgatgccatgcgtaccgctgcggccaatcctgccggtgccgccatgggctttatgggcatgggcatggccagcggtatgggtggcatgaacgccgcgcagctctttggtcaggcgtctcaagcgcagcaggctcccgctcaggcgcagcctgctggtgcagctggcggagtcgcggcgggtaccggcacggcggcggcgggagccgcctggacctgttcgtgtggtgctcagaacaccggaaagttttgcggcaactgcgggagccctaagcccgaggctgcaggaccctggttctgcaccaactgcggcacccagaacacggggaacttctgctctggctgcgggagtaagcgcccgtagcaagaagatgcggggtcacaggacgatggcatgatgccgcgcgcataagtcgccgtcgacagccggcttggctggcgtgttagggtacgtatcccagtccaaagtggccgtcggtggtcctgtgatcctcaataaaaagcaagatcgcgtgagaaaggagcacgccatgaaaaagaaactcaactcccttattgctgtggccctgtgtgcgcttgctacatgcttcgtgctcgtcggttgctcacccgtttccggtggcaagaacgcgaagatggtcggttactgggagcttgtcagcggtacttccggtggtcttgaaattaccgaggacgacgtcaagaccatgtcggaggaggggtcacagtgcatcctgcatctaggcgatgacggtaaggctacgctcgatctctttggtgatatcgaagacgcggcgtgggacatggacaaggcgaccgtggacttcgatgacgaagatggcattttggtgctctccggtgatcgcctgaccctctccaataggaatgatgatgacgagaagctcgtctttaagaagggcgacgacagcctgaaagaaaagatcaagaaggatcgcaagtcgcaggaggaatccaacgagagtgccgatgttgccagcggaaacgacgccaaggccgagagcgtggcaattgacccggtggtgaccatcgccgacgatgagaccgcgaccattaccgcaactgcccgtgttgtggacgaaaacggcatggccggcatcatgttctcgattaccaacaacagtgaggccaggatctgcatgcatatgctcgacgattccaccgtcaacggcggcacgtatgaaaactacttctacggggacgtctcaccgggggagacagccaacgagatctgcgcttacgacggccttacttcgatagacgagttgaaagacattcatgcccagctcagtgtgtacgacagcaagacctttgccgacatcgcgatctacgatatcaacatcgagtaagagatgtgatggcattggctggctcgtgagatagcaaggcgacgaggcggccggggatggtaatctcccggccgctttttgctggggatacttcgattacgcctcgtcgttcaagccgggaacgatattgccctcggccaccgcatgcacagccaggcgcaggatgttgtcgtagccggtcttggcgagaatttcgccgatacgccgcttaacggttccctcgctcatgtagagctcggccgcgatctctttgcgcgttttggcctcgcacgtcagtcgtaggatctgaatctctacgtccgtgagcgaggctgtgcctgaaaagatcgagtcaggcgttttttggggaaaggtctggtaacccgaggcggtcgagcgcatgacggccatgagttcgccgatgccgacgttcttgtatacaaagctgtcgacgccggcggcttttgcctgctcgacaaaagtaacttcgggcatacccgtcatgatgaccacgcgcaccgtggggtccgcctccttgatgcgccgggcggccacgatgccgttggagccgttctcggtgcagacgtccatgagcacgagtccgcatccgagtctggctgcgcgctcaggggcctcagtggcgtctgcgaggctagctgcgacgtgcatgtcttcctggacgtttatcgcgcaggccaggctctcgcgtaacatcgcctgatcctcaacgagcagaacttcaatcattgccagtcccccctctatgcaagcggctccatcgtaggctgttgcgtcgtgcggcacggtgttgttgcccgttccctcgtgctcccgctaacggggatttcgacacgaaccgtgaacgtcggctcccagcccacgctcagcgtaccgcccaacgatgctatctctcttctcattcccgtgataccgccccgttcaataagcggttgtggtgacgactcgccatcgtcggtgatgacgaggtgggctgtgtcgccagtacactccagctcaacaaaaacctgtttggcatgggcatgccgacatgagtttgtgcaggcttctcggattatgtgcgtgaaggctacgccggcactgccctccggaagctcaccgttcatcttgatcgcgacgcccaccagcgcaaaagccgatacaacggcttcgagttcggtggaagcgtcggcttccgtgccacggcgcaaatcgaccatgacggatgagaggagccgctcgagttcggcaaccgatatggggtcggtcatgcccatctcgagatagcgatggagaatcgagagccgctgcccaatgacgtcgtgcacacgcgagcgcatgctcaggtaggcggaggcttgtgccacgcgctcgatgtcggcaaggcgcatccgtagctcggtggcggcctcctcaagttcgcggttggtcttggcgagggccgcatttgcacgcgctgcctcggtgacgtcgaggcatacgattcttcttaggggacggtggccgccggttgtatctcggacgaataaacacgttgtgctatcgggaagattcaccaaaaggcggtctttatcctccattagcgtctcgggcacgcctaggaagtctgcttcaacagccaagtcgcggccgatttcggaaaggcttgtccacagctgggtctgatctccgaggtcgcagggcaactccaatgcagagaggcattccctcatccgcacgttcataaaggtggatccgccggtggggccgatgaccagtacgcccgcgggcattcccattaacgtttcggccgtgctgagttccgagaggccctctgagcgtctgacgagatcgcgagcgattccagaaagtccgcggaacaggaaccaagttaggtcgagcaaggcaattaggttccataacgtgctgagcgcggtgatggccgctggtgtgcacagggccatgagcagggcgtcgaacataaagtcgatgcgtcttgcacgtaatgcgagggcaaacgtccatgctgcaaagagcgcgttgatccatagcacgccaaaggcgggaaaggatgccagtgcccgggccaggaccggcgcaccgatgagccctgcaccgacggtgaggattaacgcaagggccaggtgacccagaatcgcagcctcgaggatgcacatgagccgccttgatttcggagccgtctgaaacgcaaccaggaacaggtggaccacctgaaggcttgcgcacacgaactcgccggcaaccacgagcatcagacagggctcgttgagcaagagcgggttcatacgcactcaccgccctttacgcgggcgagcaacactagctgtccggtattgccggtcagcgcgtagatgacgtcgcatttgtctaggcgttcccgcaaggcctgcgtgcggggtagtgagctaaggtcttcttcgtcgtcggattgtagatgggcccgtagctcaatcaagccgtcatcgcgttcgccaagatgatagatgagtgctggagacgagcattcaaatgccataaaggccatatcatagatgcagtcgtagagcgtgctcgcctgctgggccgcaacgggatggtcgagattgacgagagcggcgcaatcgataccgacggcgcgcagatcacaggccaactcgttagcgataaggcggatacggtcgcggtcaagctccgggtcggccgcttctgcaaggacgagcgagcccttgcgcttgcaataggcaacgagcatgcgcgcacgttccagctgtcgctggcgagcgtgtggctcggtcggcaggttgttcaacaacgctgtgacctcggccatggacgcggatagtgcggcgtcgacatcgtccacaaggcgcgacttcacctcgagttccgtcagtagttcgacaagctcacggtcgtgttcgagggcctcaaggtcgcgtttgagttcggtgccttgtttgcctagggttcggttgagttcgttgagtccgctcatgtcttgggtgaggagcgccgttccgccagaaagcggccagacgatgaatagactgtcggggaggtctggcagtctgaacgatcctggtgtgccgtgattcgcgcggttgacggcgtttgcattcagcgggccggccactttggtctggtgatacagggagccgttgcgtgacaagattttgagatcgaaaggaagatcgtcgaatacctttttgaacgacctcgtggaggggatgagtcctaggtcgaggcagagttcgagtgtcaccatgacgatgattccgtacacgagggagaagttgaacgaaaccgcccatttcgcacggagggcgtaagcggcgcaaaagaggagtcctgccgttgcgaccgtggctgctggcaccacgagaccgcgcattgcgcttctgctcgagcgccacaaaacgcagaaaaaggcgaggtaatacagggtattgtaggcaaagaaggcccagtaggcagggccgtaggagtacatgcccacaaggcccgggttgggtacgtcaaaggtaaagaagagccggtggacgtcgttggtgagcgcgagcacggcaagcacgatgccgagcgctatgcaagcggttttaagccgtacagccgttttgccaagctcaatgccggctgacttcagcgcgcaggaaaggcagagcggtggcagacaggccatggggatgtagtagccgtaccagaggtagcgcgcaagcttgaggtcggtcgtgttccatttgatggtcacggccgtgagccacaaggtgagtatcacggctatggcggcaaggcgacgtgagattcgcgggtcgaggcaacgcaggtaagccatgacgccccagaacgagaacacgatgccgaagatgcagttgagagcggtgcgatcgatgaaagagaaggcactggcgttatcggaggacggcacgggggccgagggaggccaggcgcaggcgagggcgatcaccaacgcaaggtagaggagggtgacactcgcgcatatggtggtcaggaggccgcggcgtgagcgtgtgaagatggacaaaacggtgccgttgggcatatgaacatctccccgttacagaaaagttgatagcgcgccgaaagtgagtgctggcacttggcatctacctgatatcctgcccatgcacatgcgaaataggcccgcatggcatcttgacttacggctaagcgcgacgatggcatccatgacagcatgcgtcatggatgccatctatcgtatcatgcacgtatatcgcacgtattcctgttactcccactcaataagtgaaaaagtctgaggtttgagcctgcgtatgcggtgtgagccagtttttgagtgtcgttgggtgccgaattcccgcgacctgggcttttgctgcgtctcggggacaatctggggacaaaattcaaactcacgggtaaactcacaccctctgagtttggatttttgtccccaagattaagcatcagcgtttccgcaggtcgatgcaatgaaaaatgcttgacatcatctaattgaagcttaagcattgcacggacaggcaggtgcggtcaaaaccaagggaatgcctatgctccgaacttatggataaagcactcgaacatgatgcgtgccgcgatggcggtcgtgatgccgtggaactcgaatgtcgggttcacttccgcgatgtcgaaggtgaggtagatcttgtcgcaatcggaaagctacgccagggtttcggcggcgatctggcaggggtcgccttcctgcacgttccaagccgtgcactgcttcacgccgaggttcttcaggcaatcgtaataccaggggtagttgaatcccccgaagcccgatctgcaccacgtgctcgggattgacgcgctcgagctcgagcgcgctgcgaatctcgctcgattgcgagtacttgccttgcaggtggctctcgtcgaccaaatccaggtgcgcgtcgaaatggatgatgtccatctctccttcgcaactgtcgtgcagcgcgtagatgatgggatacgaaatggaatggtcgccgccgatgatgaacggaaagccaccgcctcgatgattttctcagtcgtggccttcgagtccctcgcgtccgagggcgtcgagatggccgcgcacgccgacatcgacgacgaggaccagaccgtccgcttcctcgacatccacaccaccgcgatcgacaagaccgacggcgacaagctcgtcacgggcagcgaggccgtcgtctccgacgaggtggcctacgaggggctcgtccccggcaccgagtacgcgctcgaggcgacgctgatggacgcggagaccggcgaggccgtcgccgttgaaggcgccaccatcactggcacggcgaccttcacacctgagacggagtacggcacccaggcggtcgagctttccttcgacgcatccggcctgggcggaaggaagctcgtcgtgttcgagaagctcaccgcagacgacgtgcagctcgcatcgcacgaggacccctccgacgagagccagacggtcaccgcctgcgagatcggcaccaagctcaccgatgcctccgactgcgaccaggtcgtaaccatcggcaaagtggagctcaccgacacggtcgagtatcagggactcgttcccggcgacaagtacaccgtgcacggcaccatcatggtgaagtccaccggcgaggtgctcagcgacgaggacggaaaccccgtcaccgcgacggctgagttcactgccgaggcctctgcgggcaccgtcgaggtgtccttcgggttcggcgcgttgtccctgaaggaaggcgacgagctcgtggccttcgaggagctactgaccgcacagggcaacctggcggctacgcaccaggacatcgacgacgtcggacagacggtcgtgatggacaaccccgatatgcccgaggtccctgcgtctccctacgacaagacgggcgcagacgcctcgatttcgctgccctttgcgctggtgggcatgctgatcgtcgctgccggcgcagtcacgctcgtgttcgccctcaagcgtcacggcaagggcgacggtgatgacgatccttccgaggaggtgaccgaatagcatcccgggccgcaggacgaacatgctctgcggccctttttgcttgggaaccatgaagacaactgcaagaaagatagcggttgcggcgtcgtgcttggccatcgccgcaggcatcgccctgctggtcgccgggcaggtgcaatccgagagtgctcggaacccggcggtcaagtacgcagtcgccgccgtgagcgagcagcccggcagcgacgagaggacgattgactgggacgcgccttccagctctgtcgtcgcctgggtgagcatcccggggacctccgtggactgcccagtggtgatggacaaagcaggtgagcccggcttctatctgacgcacgacgtcgagggcgcctactccgcaggggcacgccctacgttgcagccggatgcacagatggcctgcaaaagcccgctcgtcatggtctacggccaccgcatgtcagacggctcggtgttcgccgacgtcgcaagcttcagcgatgagggattcgcccgcgagcacgacgagattgttctctacacgcgcgagcgaaccatagagctttccgccaaggccgtgaacgtcgtggatgcaagcaaggaggacgtgcgcctcggcttcgaggatgctgacgacctggccgtctgcatggcagcgcagttggccgagtccgaggtggtcctcggcggcatcgagcccgggcagcaggtcttcgcgttctgcacctgctcgtatgaaaccagcaactcgcgcacgatcgtctacgcgaccgaggaggaccaatgagcacggtattgttcgtcgtcggcatctgggccggcctctgcaccttcattggctactgctgcgtgggggtcggctccatacacgacgacggtcttgaggatcggcatgcatgcgagaaggaaaccatctgtcgcaaagaccggtaacaggcaccaggcttcaagaatttggacgagcgggatcgcagcacgcgttgcgattccgcttcgcgtctgaggcatgcgggcctcgggagagcgcatcggtcggattgatccacgaccgagcggacagcttgacgttcatttcgaatgcaaatgggcaatgcggattccgatatatcggcgggtgtaggattatggaatccgaagccgttgtgaccagcggcttcgtcgaattgcccgcttggcgtcaggagacgatatgcccaagatcaaactccaagatctccagaaggttatcaacctaggcaaaaacgccatggaccttggcaaggaggtcctcccggctcttcagcccgttatcgagacgtacgcacccaaggtcgtcgagcaggttcaggagaaggccgacgaggcggcaaggaacggcaagaacgccaggttggcgttcctcaacaacctccaggagaaaaaggaggccaaagagcagagcaaggccacagaggaaacccgcaaaaaggccgtcgcaagctccctgccgcccatcaccgcgaaggagttctacaggaacttcgagaacaacgtcgccgacggcagcgacctcgattcgggttacatggggttcaccggctgctacgccatcgtcacgatgaagtcctcccgcgagaaggacctgtcttcatacaaggacgtcttcgtcggttgcggcaagtcagtaggccttgccgtctactcgcagcttcgcggcctcggcaacatcgacgtctatgccgattacaagttcaaagagtccatgtgggtcctctcttatccgtgcgacgaggacggactcggaccacggttcgccgacctgctccagagcctgcaggcggctgattcctacaacaagtgggacctgcagtccctcatctcggaagagggctagaaagatggcggataccggcaaggagctcgcggcggtcaacgtcgagatcatctcggcggaagacctcgacggtttgagcgtcgtcgcgaaagtcggggacaagcccgatgcgtcgggctccctcgccagagccgactcggcccttcagcttgcaagcgacgttcttgagagcattcctgagaagggactgttcaaagttgaggtgcctgatgggttcacgcttcaggacctcatcccggcgaagggcgacgaaggcgccttcagggccatcgtcaaggactcgaagggcaagatggccgggcaggtgaagctcagggaggcaggcaagatcagcccgacgcagatcgccggtgccggcctcgccgcggcggcgatggtcgtcggccaggcgtacatgaccgagatcagcgacagcctccacagcatcgacgagaagctcgacaaggtctcatcgatgatcgccgacgggcagagggcgaagctcatgaacgcattggacatcgcgaagacctactcgaggctctacgaagattaccgccagaagcccgatgcgctgcgcgcggcacgaaacgagatagagcgccgctacaacgacgtcggggccgtcgtcgactggatcaccttgcaactgggcgggcttgagaagatcgccagggatgcgaaggcgatcgagaaggatcttcggccgctactcgaagagcttcattccctcgaggatcagttcggcatgggcctcaaggcgctgtccgcgctcgccatgacccgcatgtactatgacggcgcgaccgacgagaggagttcccttgtcgaacgggagcgcattttggagaaatcgcgcggcttcctcgaaaggcgcgcctcggtagccggaacgctcgaagtcaagatcggggcgatgagaggggcgcccgtcgcgcttcctaggggaaccgacaggaaccctttaaagaacctcacctccatgacgcctcgtgccgccgccaagcgaaacctgctcgaggcgaaggtcgggatgcagtcggacctacgcgcggcccagacgaagaccaaggaagaggcgcaggattgcaccaagggaatcgtgcagatagccgttaccgcaagtacatccaggaccatcctcacagatggcgagaactgctggctggttgagaacgccaatgaaaagcggggctaagtaaccagctaatgaaaagagaaggccgggcgggtatgctcgggcatgaggggcgccggacatgcgaccggccggacaaccggcgtcccttgtcctttcacaaatgggcaacgctacatcacccacttgaacacggcgtggaacagccatgtgaagaacgcgagcgtcaggcgcagcgcgtccttcaggaatctaccaaccctcttcatccagatcactccattcctctctgatctcgtcttcttcgttatttccgccatcagcttcgcgaccagctccctcggcatccccggcacgtcggggacgtcgtcctcgccgttgctcaggatcgccgccagcttgcgcacttgctgccgtacaccccttgcggacgcgcccatatgggcgcgtccgcgcagccgaaagccgccatgtcgcaccagtaaccgtcgatgcgcaggtacgcgtcctcgccgtcgagtgacactcgccgcacgccctcaaggtatgggcgcagaagcgccaggagctctctgagggcaagataacgcccgaggagtacgaggaatggaaaacgtccttctaggccgttagaagcgaattcgcacatcgtggagagccgtcctgcggggcagctttctcatgtcatggcctgaaaatctttattccccaatggaaaacggccgttttagggcaggtttgggaataacggccttgtcccgaaacttgcggcacatggcggcattcagcggcatttggcgagattcggcctttttcggcaaatctttattccaaaatggcgacctgcggaaacgcgaaaaaattcaggctgaacgggcttttaagtttgcggggcccgaaattgatggattcaaggctcgggaacaaatttcattctttattcccggcaatagttgcaagcgtctcgtgactcatcgtgccgtctggcgttacagggtgcggagcttggggataatcatttaatacccgcaggtcaatcggacaaagaaagccctcgactccttccagaatcgagggcttgattcgcttgattactcacctgaattgcaggcggcttggtgctgacctcgcacccaacggcactcggtggtactcagcgggacaaaacaccccaggtcaaaaccctgttttgttactcccactcgataattaaacccgcaggtagaccatgcggagaaactagacctcatacatctaccagcagaagtatgctcgaaaaaatgtacccatagtgcacccacgccccagattaagcccttggataaccatgcttaaaccgctcgtcaaacggcaagtactcgctataggtatcaccagtaagaagcaacgatccgtccgcgcgtttaacgtagcgtgtttcgaatgtcgattcccatcccctctcaggctcatcgaggtagcgataggtatccttccacctctggaacgagcggtcatcgtcctccatttggtgtttagcccatgcggccaaaaagctttcgggaccctttcctctcgcgaccaaaaaagcttcctccccgtccatatgcgggctgaggccgtagtccccggcaagctggaacatggcgtgggctgcctgaacaggagagccgaagtctgtaaataccagggttcctctggttacgcccaaacagtcggcaattcgggtaagcgcagcgcgcttcggaaccctgacgccctgttcatatccatgtagagctcccagggagacacccgccgcctccgcaagctccgcctgcgtgtatgggggctcatgttcctcgcgcagcgcccgcatcttggatgcttggcacctgccctgccatggctcaatctgtttccactccccatcggggcccatctcatacttccctgggaaattctcgggttcgaacgcaagagcgaagttacccttccatcgctcgtagtcggcgcgatcgtcatcgtcgtctatgcaattgtattgagcggcccacttcctcaggaaccgagccatgaactcggatgtcggcttcaaggcagagtacgagtcatttgagtagggctcgagaccataagtctctgccagctggaagaaggcaggcgcgacaagctccaagtcgacaaaatcgtagaaatgcagagactccgccctcacgccatatgcatttgcgagtgcgaggagatgttcttcctttgggacagacttcatcagctcgaagtgctcgtcgcgctcgacgacctcgaagcccttggagcggttgaggccctccatctcggggatggagaagtagccccattcctcggcgaacccgcgcacgaggccgaacgcctcaccggtcgccgggtcgtactcggtgagccaccagtcccagccgctcgcgcacgagaagtagtggacgaaaacggtcgggtcctcggcgccgtcctgcgcgtacagcgccggcagccccttggcgatctcccttgtcatgagtgcttgcatgtcttcctccgttccgggcgcgtggcccttagaatctcgagcccttgcgggcaaagccgaatggcggcgccgcgcgtcgtcgttcgctttgctccctgcaaagccgcgccggagcgaagaggggtcaagggaggtccgcgagacctccaccaatcgaagtggaacgtagatttgtgcggggtctcgtgggtcccctttacgcctcgtagcgtaggcgccacccgggccgcagagcacgaggtcctggccggcggacgccaccgaggagctggaaacaatggaccaagattgaagaaggacggccatccctaactggatggccgtcctagtgcgctctgtttttctcggcatatggcctgccagaggcgcccgccgatcagatcctagtgatagtcgtttgcgaaggagccgtagaagagcgccttgcagtcgacgtcgttgtcggccatgacggcatcctggacctcggggcgcaggagattgagcaccctgtattcatcgttgcccatgtcccccacgaagagcacctgtttgaagacatcggggtactcgcgcaagtaggtcacgtagcccctgagctttgccagcgtgtcgccgaggaactcgccgtgggggtcgacgatggacggcttgatgatgccgtcggcatccttcacgaagaagaggaagtcggggtgcagtgccttgcggccgatggacgacatatacgggatggagaacgccttggccgacatgctgcctgacgggttgcggtagaaggcgacggtgcgctcctttgcaagctcgtttttgaccacgaacttctctgcgggcttgaggtcgagcgggcagaggccgtcttccttctgcacgatgtggcgcgggtacttgtcgaagtcgtccgacgtgctggttgaggtaggccactcgattttggtgaggcgcttgccctcggtctcgcgcgcgagctcgtcgtagcgctgcttagcggcatcgctcaggtagtcgtagtcgcctgagccgtcgaccttgtcgaagtagtccctgcgacagcccgccgcccagctttcgagcgcagagacgatggacggcgtgcgcacggccgcggcaaggcgcaggtcacattccgggcgcccaagctctttgaaataggttttgcgatacgcctgcgtgaactccttcgtgaagcggatgtcggcatcgcgggcggccttcttgaggccctcggcgtctgtgcgcgcctcttcctgttcctggtcttcggtctcgttgagcttgtcgagcgtgatctttacggtctcggcgacctcaacgtcgtgcttggcctcgttgtactcgtcttcgttggcgacgatgaagcccgagagcttctggacgaactgcctgttcacgtctgccgcggcatcggtatcgagtccggtctccacgagcagggtcgccgtcttgagcaggctctggaactcgtttcgagccttcttggggatgcgctgcaccgggatggagtcgaaagccgcgcggatgccctgccactcctggggcgtgaaggactgctcgcgcttggtgggcggcttgggcttggccatgggcacgggctttatgaccgaggcgggctgggtcggttcggactgcacgaattccggctccgaggccgttggctgctgcggggtggactcggtatcgttgccgccttccatcgcgacctggggttccagatttgtctctggcgtcgcgccatcgtttgcgggttcgaccgccgaggcaagcgagggctgcgtgccctgcatgtccaacggctcttggatcgcgatgccggcaagcggcgcctggtagccgggttgcgcctgtcgcgctgcctcgatggccttcttgttctcctcgtacgccttgagctcctgctggtagtcagcatcggacttgggcgcggccgcggtaatagttacagggttgaggacgatgttctgcttgcccagggagctttcgcccatgtcgtctttgcggcccatgaggtaatcgaccacgtcttgggtactctcggggttgaattgcggcaagtagcaggcaaccgagttgagaaggtcgtcggactcgatacggcgcgcgagcggggtgcgcaccatgcggcccacgagctgcgcgatgtaggtggaatcggaacggcggcgctgcgagaagatgacctcggcgcgcgggcagtcccagccattggagacagcctccttggcaaagagcacgcggacgcgcgaggtgtcctgcacgaactcgggctcgacgtagggaatgagatatttgcctgcggagatgtccttgtgctcaccgaagacattggcgaacgacatcgcctcggaaaggccggggaccaagctcatgatctggtcgcacatgtcagccagggcggaggtactcacattgtccgccgcctggatgagcagcagcgagttgacggggctttcgccctcgcgggcgcagtagtcgtcccactcgcggcaggctagggcatagcgctcgcaagccatggtgagatattggtgctctacagggtcgtccttttcgggaacgcgcagcttgataatgtccttgagcaggccggattcctgcacgtcgcgcggggtgacggccaccttgggcatgcggacgcggtcgtcgcgctggcccatggccgcctcgaagcgctggggcgtggccgagacgccgacgacgatgggcatgggcgcgcgcccctccaggccatcgatgaggttggcatagatggtggcggtgccgcgctcgctagaggcgttggcgcctaggccgcggtgggcctcgtcgatgaacaggtagaggttgcgctcggggtctttgatggtgcggtcgacgatgtcccagaacacgcggccggagttggcctcgccgcccttggtgagcaggccgttcttgctaagaaggtccttgctgaggaaatagacgtggcgcggctcgagcatctcgtgcgaggcgccgaagtcgttggtgacggtgaccaggtggcgcctgtcgaggatgctgtcggcaagcttgtcggccacgttggagaagcgcacgctcgtctgctcgtttaagttcggtgagtcggagagccacaggaccacggcgttctcgtcgggcatgaggccgaggtcgtcgtcgccgaagaagagcgcctcgatggtggccgcgcacatgacggtcttgcccgagccggtgggcgacgccaggcatatggcggtgagttcgccttcctgctcgtagcgacggcgcatagcctgcagcttggtggccagggtcgttacggccgtggcctggaattccttgagttcaactctcattgttacctcaccgcatcctctgcggcaatcttgaaggattgcaggtagttctcgtacagacgaacgacgtcgagcccggggagctgtgccttgacggcggcgaagcgggctgtgtcgtccgtgatcacgtaggcgcacgctatgccggggtcgcccttgacggcgttggcgaaggccccgaccgaggcgaagtcgaacaggacggcgtaggcatcggccacggcaaagcccggctgctcgtgctcgatgatgctgccgcgcgagccggcgcgcaaccagagcaggggcgcgatctcctcgaaggcaacgcccagctcgacggcatcggggtcctcgtaggtgaggtcgaagaagacggcgttttcctcgaagccgtcggccatggggaactcgtcagtgaacttgtagtcgcccttgatggggtcgccctcgggtgtcttgcccgtgatggccgccgtgacgcgtggcttggtgacgtactggcagatgcccagcgcctcccattcggggtcgccccggcgaaggccgcgcttggtgagcttcttggactcgtcctcggagacctcgttgttcgtaacgctgatggagcgcctgcgcccgccgtcctgatggttcaggcgcatgacggcatgcgccgtggtgcccgaccccgagaagaagtcgaccacaagggcgttgggcttgttagcgacgaagaagcggatggtgtcctcgacggcgtagagggatttggggaaggggaagcgcctgttaatgagaagcgagttgatcatgtttgagccatgggttgcatcatgggactccatgacccagatatcttttgggcgcacttcattaagcgaggcatcctgttcgatgatcggtttcccgtttgcctctttgccgagtactcttacttgtccgctcaagaccttctttctatcggcatctttcaagtaaaggaactgtgccgcttcttttgactcgtcggtggttgacaggtaacaggttccctcagcgagctgctctttgagcctggatggctgaacttgccagcacccttcctctccgtttggacgaaggggatatgcagcccatgttccttcggggcattcaacatcgtggcgattcatctcaaccggcaatggatcgccgactgaatgcatagtcccatcggaacggttgatgaaaatgggatagaacagccctgggcgccctcgtctcgatgctcctaaactggtccccctgcgcttaaggtattgccaacatatgggggattcagaagttgcaaccttacccgtgccgttcatatccgttgtatacgaaatcggacaagcagcgcccagcataacgtagtagataaattcgccgcatcttgagaattcgcttctcctgtttgaaccttttctgctgataacagacgaaatcatctgaatatttgcgtcgctaaaaacagattccagcagcaaccccaacctcaaatactccttctcatcaatcgtcacgatgagcacagagtcgttggggttgagcagctgcttggccagcttgaggcggcgctccatgaaggcgagccacttggagtggcggtaggcgtcgtcggcgcccacgtagtcgttgttgtacttccagtcgcgcgcaccggtgttatacgggggatcaatgtagatgcaatcgaccttgccagcgtaggcgaaggccagagtctcgagcgcatggtagttctcgccgttgatgaccacctgatagggcttgtcgccgccacgctccacgcggccggtctctttaaggccggcgtagatgggctgatcgtactcggccacgacgacgatatcctcgacggcaaccgcgcgggggtcgttggcgttctcttcataagaaggcgaattgtagggcgatagctgggccgtctggccagagatcgtatcgacgcgccaaagcagctgtgaggctgcgtcttccttcttgccgcgctcgggcaggacctgcacgacgtcaccgcgcatgacgggcttgccgaacagccgcaggcgctcgggacggttgtgctcgaagaccaggccgaactggcgctgggccgcgaaggcgcggatatcggccgcgagctggcggtcgcccagcttgacggcgcggtcaaccaggttttggacgacggcttgcgctgtttgggacatcacttgtcctccttgcacttctcgtcgatccactcacgcagaactttggcgacagtcttgtcctgacgtgctgcatacgacttaagagcccgcttgtcctcacgggttatcgagagcgtgaacttgtccagctccttcgcgctctccttgagttgcgcttcgggcatgcgggcggttgtattgattttatacgtaattacgtataaggagcagcaaagaagcatctggcggtgtgtgttgttctattcgaaatggggctgttcttgcctagaaggctgaacgttggcggaataatccaaaacgcaagttaaaaggactatttcaggcccagtgagtaccagaaaaccggccctcaaaatgccgtgagtacaatttgagtaccaaatcgcgcggcttctcgacaaagacggcaatcggccggtcagcatcaattcgctaaagattgatggagtggtttgacgaattggaatcgagccaaaacataccatcaaataataatcccagctaaacagcttgagaggttgttccagtggcttgtttgtaccacgtacacgagagcgaacgacaacccacagtatgcaaataaaaaacgagggaggccgcattcggcctccctcgcaaagggtcttggactattcccactcgatggttgccggcggcttggaggtgcagtcgagtaccacgcggttgatttggcggcattcgttggtgatgcgcgtcgagatggtggccagtacgtcgtacggaatgcgcgaccagtcggcggtcatggcgtcttcggaagacaccgggcgcagcacgatcggcgaaccgtaggtacgctcgtcgccctgcacgcccacggaatgcacgtcggcgaggagcacgaccgggcactgccagatgtcgcgatccagaccggcctttgacagttcctcacgggcgatggcgtcggcttcgcgcagcaggtccaaacgttccttggtgatttcgctgatgatgcggatgcccaggcccggtcccgggaacggctgccgccagacgatctcgtccggcaggccaagttcggtgccgatggcgcgtacctcatccttgaacagggtgcgcagaggctcgacgagctggaacttgatgtcatccggcaaaccgcccacattgtgatgcgacttgatgttggccgcaccgtcgccaccgccggattccacgacatccgggtagagggtgccctgcacgaggaacttgacttccttgccggaagcgccggcttcctcgatgacctgacgctgggccttctcgaaagtacggatgaacttctcgccgatgatcttgcgcttcttctccggctcgctcacgcccttcagcgcggtgagaaagtcctcggaagcgtcgacggcgatgagtttgatgcccgtggcctcgacgaagtcgtgcctgacctgctcggcctcgcccttgcgcagcaggccgtgatcaacgaacacgcaggtgagctggtcaccgatggccttatgtaccagcgccgcggcgacggcggaatcgacgccgccggacagaccgcagatcacctgggcgtcgccgaccttgtcgcgaatcttcctcacttggtcttcgatgatgccggaggcatcccagttgttcggcaagccggcgcacttgtgcaggaaggtttcgatgagctgctgtcccatcggggtgtgcttgacttccggatgccactgcacgccgtacaacttgcgggattcgtcctgcatggctgcgacgggggcgccttcggtgtgtgccagcacttcgaagccttccggagcggtcttgacggccactccgtggctcatccatgtgttctgctcggtaggggagccttcgagcaggccttcagcctcatcgatggtggtctcggtcttgccatactcgcccaaagccgccttgtcgacatccgctcccagcgcataggccatggcctggaagccgtagcagatgcccagcacggggacgccagcctcgaacagcttcttgtccacgcgcggggcgccgggttcgaacaccgaagccgggccgccggaaaggatgatggcctgcggatccttggccagcatctcgtctaccggcatggaatgcggcacgagttccgaatagacgttggcctcacgcacgcgacgtgcgatcagctgggcgtactgggctccgaaatcaacaacgagcacaggacctgtcgccataacactctcccttggtacgaggtaattagaaaccgacaatgataatggctccattgtggcggtgcaaggcgacattggaaacgctgtaaacacaaggtgaacgaatctcacaattgcttactatgttcgactcaacacgccgcgagtgaacatcgtaaaacgaacgtggctatatgtctcaatcgattgaaaatcgttgatattgagccgtttataaccccttttcatgatactgcgagtattcacaaaagccccgataaaagctctcagtttgtatcaaaataacaacatttgcgcacacagtcgcaaaaaaacagccaaaagtcgcacctcgctcgtaatatgctcaagtgattgggaatgaaccagccgcgcaaccgcaaggttttgcgaggttcaggacctaatgaaaataaacaatcgcacaacacagtgcaggagtacaggagtacacatgacgagtcctgttattggcaccccttggaagaagctgaacgctccggtttccgaggaagctatcgaaggtgtggataagtactggcgtgcagccaactacctctccatcggccagatctatctgcgtagcaacccgctgatgaaggagcccttcacccgcgaagacgtcaagcaccgtctggtcggccactggggcaccaccccgggcctgaacttcctcatcggccacatcaaccgtctcatcgctgatcaccagcagaacaccgtgatcatcatgggcccgggccacggcggcccggctggtaccgctcagtcctacctggacggcacctacaccgagtacttcccgaacatcaccaaggatgaagctggcctgcagaagttcttccgccagttctcctacccgggcggcatcccgtcccactacgctccggagaccccgggctccatccacgaaggtggcgagctgggttacgccctgtctcacgcctatggcgctgtgatgaacaacccgagcctgttcgttccggccatcgtcggcgacggcgaagccgagaccggcccgctggccaccggctggcagtccaacaagctcgtcaacccgcgcaccgacggtatcgtgctgccgatcctgcacctcaatggctacaagatcgccaacccgaccatcctgtcccgcatctccgacgaagagctgcacgagttcttccacggcatgggctatgagccgtatgagttcgtcgccggcttcgacaacgaggatcacctgtcgatccaccgtcgtttcgccgagctgttcgagaccgtcttcgacgagatctgcgacatcaaggccgccgctcagaccgacgacatgactcgtccgttctacccgatgatcatcttccgcaccccgaagggctggacctgcccgaagttcatcgacggcaagaagaccgaaggttcctggcgttctcaccaggttccgctggcttccgcccgcgataccgaggctcacttcgaggtcctcaagaactggctcgagtcctacaagccggaagagctgttcgacgccaacggcgccgtgaagccggaagtcaccgccttcatgccgaccggcgaactgcgcatcggtgagaacccgaacgccaacggtggccgcatccgcgaagagctgaacctgccggccctcgaggactacgaggtcaaggaagtcgccgagtacggccacggctggggccagctcgaggccacccgtcgtctgggcgtctacacccgcgacatcatcaagaacaacccggactccttccgtatcttcggaccggacgagaccgcttccaaccgtctgcaggccgcatacgacgtcaccaacaagcagtgggacgccggctacctgtccgctcaggttgatgagcacatggccgtcaccggtcaggtcaccgagcagctctccgagcaccagatggaaggcttcctcgaggcctacctgctcaccggccgtcacggcatctggagctcctacgagtccttcgtgcacgtgatcgactccatgctgaaccagcacgccaagtggctcgaggctaccgtccgcgagatcccgtggcgcaagccgatctcctccatgaacctgctcgtctcctcccacgtgtggcgtcaggatcacaacggcttctcccaccaggatccgggtgtcacctccgtcctgctgaacaagtgcttcaacaacgatcacgtgatcggcatctacttcccggtggattccaacatgctgctcgccgtggctgagaagtgctacaagtccaccgacatgatcaacgccatcatcgccggcaagcagccggccgccacctggctgaccctggacgaagctcgcgccgagctcgagaagggtgccgccgagtgggagtgggcctccaccgccaagtccaacgacgaagcacagatcgtgctcgcctccgctggcgatgtcccggctcaggagatcatggccgctgccgacaagctcgatgccatgggcatcaagttcaaggtcgtcaacgttgtggatctggtcaagctgcagtccaccaaggagaatgacgaagccatctccgacgccgacttcgctgacctgttcaccgaggacaagccggtcctgttcgcctaccactcctatgcccgcgacgtgcgtggtctgatctacgatcgcccgaaccacgacaacttcaacgtccacggctacgaggagcagggttccaccaccaccccgtacgacatggtgcgcgtgaacaacatcgatcgctacgagctcgttgccgaagctctgcgcatgatcgacgctgacaagtacgccgacaagatcgacgagctcgaggccttccgcaaggaagccttccagttcgcagtcgacaacggctacgatcacccggattacaccgactgggtgtactccggcgtcaacaccaacaagcagggtgctgtctccgctaccgccgcaaccgccggcgataacgagtgagcctaggcgttacagcctgatcgcttgaataagacccccgagggactttgttcccccgggggtctttacattgcgcacgtaagatggaccccgacaccccgatccacataggtgcactcataatcgttcacgcattacaattgctgatggtgtgaacaacgcagtcacccatgcatatgaatgaaggaataggagacaccgtgagtcttaccagcgtcaccatcatcagccctgaagccgcgaacggtcgcaatgtcgtggccctaggagtcgtcacagcactggcgtccatcaagaagaccgcagtgttccgcccggccgtatgccgtaaggatacgttcaccgacatcctgcttgaagccagcaacaccggtctgacccgtgaacagtccgtcggcgtctgcccacgccgcgcccgtgaagacaaggcgggttctcgcgccgacatcgtcgccgcatataccgaggccattgaggccgcacagcccgaagccgtcgtcatcgtgggcaccgacaaatcccccgtcaatgatcccgctctttttgcattcaacgccgatgtcgccgccgaccttaaggcccccgttcttttggccgtctgtaccatcaaccgtactccggaacaggtgaggttcaccgtcgaagcttccaccgccaccatcgaggcggccggcaccaaggtcgtcggcgtgttcatcaccggatgcaaggacgatcagccggaagccctgcatgctgaattcgcggattatccggttcccgtatggacgcttcccgcagtcgatttcagcgaggaaggtgccgtcgcaaaggcctccgaagcgttctccttcaacgtcgacaccgccgaccttctggcggcaatcgacgcaccgttcgaggtgccgactacgccatatgccttccagtacagcctactaggcaaggccaaggccgataggaaaaccatcgtactgccggaaggcgaagaggaccgtatcatcaaggcggccgattacctactggagcgtgacgtcgtcgacctgatcatcgtgggcgacgagaacgcgattttggcccgaggcgaggaactgggcctgaaatccctgggtaaggcgaagttccaagccatggatgatgaggaagtgctcacgccgatggtcgccaagctgtgcgaactgcgcgccaagaagggcatgaccgaggatcaggcgcgtaagcaactgaccgatgccagctatttcggcaccatgctcgtggtgctcggcttggccgacggtctggtgtccggatccgtcaactccaccgccaacacggttcgcccggcattgcaggtcatcaagaccaaaccgggcacctcgttggtttccggcgcgttcctcatgtgcttcaaggatcatgtggccgtattctccgactgtgccatcaacctgaatccgaacgccgaacagctggcggaaatcgccatccagtccgccgaaaccgccaaagcattcggtttggaaccgaaagtcggcatgctctcatactctacgctcggctccggcaagggcccggatgtcgatttggtcgaggcagccaccgcaatcgtcaaggacaaggctcctgaactggccgtggtcggttccatccagttcgatgccgcctggtcgccgaccgtagccgcaaccaaggctaagggcgatctggttgccggacatgttaacgtgttcgtgttcccggacctgtgcgccggcaacatcggctacaaggccgtgcagcgctcttccggcgcggtggcggtcggcccggtgctgcaggggctgaatcgtccggtcaacgacctgagccgtggcgccaccgtgcaggacatcatcaacaccgttgccctgacggccatcgaagcccagtaatacggcattttgtagcaagcaacgagtaatctaaggttttggaaagtcgcgtaagcggcacatcgatataacacatggaggatgcccacaatggcgaaaaccgtccttgtcatcaattccggttccagctctatcaagtatcagctggttgatcttgaaaccggtgaaggtattgcttccggcctggtcgagaagatcggcgagccggttgacggccactacaagcacgagttcaacggtgaaaagcatgagctggaagagccgattcacgaccacgagcagggtctgaagcgcgttctcggcttcttcgatgagttcggtccgaagctggacgaagccggcatcgtcgccgtcggccatcgtgtcgttcagggtggctccctcttcccggatccggccctggtcaccgacaagaccatcaatcaggtcaaggatcttgccgtgctcgctccgctgcacaacggcccggaggccaagggcgccgaagtcatgcgctccctgctgccggatgttccgcagatcttcgtgttcgattcctccttcttcttccagctgccgaaggcggccagcacctacgcgctgaacaaggagatcgccgaccagtaccacatccgtcgttacggtgcccacggcacctcccacgagttcatctcctccgtggtgccggccgtcatcggcaagcctgccgagggcctgaagcagatcgtgctgcacatcggcaacggtgcttccgcctccgccgaaatctccggcaagccggtcgagacctccatgggtctgaccccgctggaaggcctcatgatgggtggccgtaccggtgacatcgatccggccgtcgtcttccatctgatccgtaacgcccacatgaacgtggacgagctggatgccctgttcaacaagcgttccggcatgatgggcatgaccggctacggcgacctgcgtgaagtgcatcgtctggtcggcgaaggcaatgaggacgccaagctggcgctggacgtctacgtgcaccgcatcgtcggctacatcggcaactacaccgcccagatgggtggcgtggatgtgatcaccttcaccgcaggcgttggcgagaacgatgacatcgtgcgcaagatggtgtgcgacaagctcgctccgttcggtgtcaagctggatgaggagaagaatgcgacccgctccaaggagccgcgcatcatctccactccggattccgcaatcaccatctgcgtcatcccgaccaacgaggagctggccatcgcccgcaagtccgccgctatcgccgatgccggccaggacacctacggcaacaccttctccaagtgatgagaggcgtttcctcacaaatataggggagaccccgttcgtaaaaccgtgtttcgaatgcagtcgcattgtcgatcgcattcgaaacacggtttcgttttttcggatgattgccggtccgatgtgagaccgctcgttgcgttcatcgcatcgtatgaatgagggacgcatggtagtacgatacgaaggtcacgcttgatggcgtgcatgtgttctttcgaaggaagcggtttttcgtggttggacgacgatttgtcggtttggatgggctgaagggcatcgccctgatcgcgatagtgctctaccactgcgatcagggcgtcctgcccggaggattccttggcgtcgatgtgttcttcaccatttcgggtttcctgatcgtctcttcgctgctacgacgtatcgatgccggcaggggcatcggctggggcgagtattatctcaaacggtttcggcggatatacccggcgttgctggcgctgattcccatcacggtggccatggcgtggttcatcaatcgcgacatgctcgtcggtatacgcaatcagatactcaccgtgttgctcggctgctacaactggtacgccatcagcaacggaagcagttatttcgcgcaaatgaatcccgacatgttccggcatatgtggttcatgtccgtactcatgcagttttacctgctggtgccgattgcggtgtacgtgttgttgaaaagcctacatcggtggattcccgtattcgtattgaccggattggccatatgcagcgccctgtccatgggactgcggtaccacatcgacgacgatcccacacgcgtgtatttcggctccgatacgcatgccatgggattatggctcggcgccgcattcgcttgggcgctgatgctactcaggcacggcaacggccgtgtctccgaaacacagctgatggaccgtattcacgcacgttggggacggatcggtccgattgccgcattcgtagcgttattggcgttgctgtggatgatgcgtcatatcggtcaaggagccatgtctttccgcttcgccattgcgtcggcttcgacactgtccgtagtattgatagccggctccattcccttcggatcatggatgcaggacttgctggtgttcagaccgcttgccatgatcggccgttattcctacggcatctacttatggcattggccgttatggctgctcgtgcgggccgtgttcccgcagtggggtgcgcgatatgccgatcgtacactggcggtgaccgtcatgctgaccgccgtattcgcggtcctttcatggatgctgtttgagcgcccggtggcccgtgccggtttcatcgcgctgattcgcccgacagacacatttgatttggataacggcctacgattgtgggccaccgtgctcgtattgacctgtacgtggagttttgccggatatgccgttgccaatgcgcctgcgcagaccggcgttcagacttcgttggaagccaatgccagaatgttgcaacgtcagcggcgacatgacgttttggacagacgtaaggttccaaggccgaaaaggcccgtgcatacgatgccgtccgggcaccaaatgacggcaatcggcgattccgtgatgttggcttccagcaagggtctgcagtccgtatttcctggaatcgcagtggatgccgaaacctcgcgttcaatgcttaaggcacagggtcttatcgatcaggcaaaagggcagtccgatgggctgcgccagtgggtgttgatcgggctggccaccaattccgtggtgacggatgaccaattgaatgacattcttgacgatatcggaccggaacatgtactggtgcttatcaatgcgcatgcgccggtgtcatgggttcctggcaccaatgacacgctgcggcgattcgctgaggcgcacagcgacgatgtggtgttggtggactgggatgcggcgatttcagcccatgccgacgagcttgccggagacggcatccatccgggagtgaccaacaccatctacgctcaaaccgtcaaggatgcgattcagcgctggattaagcaaggccattgatcggtgaaaaacagcgaagcccccggtccgaggtcggatcgggggcttcatatactgatcgttgtcgatgggctgagccttaatcctcctgatgctgcggagcggacaggaagtgctcctcactcggtagcaccgcgttgagaatcacggcgaccacgaacgccaccgcgatgcagttggatgcgaagatcgactggaacagcggagggaagttggtgaagatgtcgccgacctgcgtgaagccgatgccgatggtcaggctcagcgcggcgatggtgatgttgcgctgcgtgtaccccgcttcggagatcatctggaagcccgacaggatgatgttgccgaacatcatgatggtgcagccgccaagcacggcctgcggcagggaattgaacacttccgccactgccggcacgaagctggccagcaccaggatcaggccacccgaaagaatcaccttgcggttgatgaccttcgtcatggccaccagaccgatgttttgcgcgaaggaggtcagcggcaggcagccgaacagtccggagacggaggagatcagaccatcaccggcgatggcgccggcggtttccctgtcggtgggctgacggtcgagacccaccttggtgagggctgcggtatcaccaagcacttccacggaggagaccacatacagcaatgcgaaggaaatgatcgcacccggatcaaactcaagctggaacggcatgaagtgagggaccgacaccacctgcaggctcgagaaaccggagaaatcgaccttgcccatgacaatcgcaaccacgtagccgacaaccaagccgaacagcacggacagctgcttggcggtgcccttcatcagcaactggaacgcgaggcatgccaccagcgagatcagaccgagcgtaagattttgccagctaccgaaatccttcgcgccggaaccgccgccaaagctggtggcaccgacggacaacagggagaagccgatggacgtgaccacaatcgcggatacgatcggaggcacgaaacgacgccaatatttggccgtcaaaccgagcacgacctccaacaggcctccgagcacgaccgcaccggcgacggcgccatagccctgattctgggcgatcgacatggcggcggcgacataggtgaatgagatgccggtgaccatcggcagacgggaaccgatcagccacaggccatacagctgcaggcaggtgcccaggccggccaccagcagaccggcctgaatgatcgtggccgactgcgcggcatccatcttggcggccgaggccaccagaaaaatcggtgccagattggccacgaacatggccatgacgtgctgcaggccgaacggaatgcccttccagaacgatacgggtgcgtccaggctgctcaacgcctcgaacgagacactcgtcttcgtgatgttcttctcttcgctcacagtaaatcctctcttaattcatgaatgagcgttgtgcagtgcaatcgtatgagtcgaaacgactatgcgcggaatgtaatggaaccggtctgggaatccatcgattccacgatcgccagcgaatcgacgtcatagccttcctcgcggagcttgtcgccgccaccttggaaacctttctccacggcgatgccgatgccctccaccacggcacctgccttatgacacagctcaatcagacctctcaatgctttgccattggccaggaaatcatcgataagcagcacatgatcgccctcattgaggtaacgcttggagacgatgacggggaattccttctgcttggtgaaggaatagacggtggtggtgtactgatcgccgtcaaggttaatggactgcgccttcttggcgaacaccaccggtgcattgtcgaaatgacgggccgccacacaggcgatgccgatgccggaagcctcgatggtcagaatcttggtgatggtcttgccttggaaatgctcggcccaggcggcgcccatatgatcgaacaattccacatcgcactgatggttgaggaaggcgtcgaccttcaacacgtcgcccggcttgacggtaccctgttcgcgaatgcgctcttcaagctccttcatgaatccccttaggtgttgtcggctgcgaacgcagcatggtaggtggcatgcggcgagccgcatatggcagtcaatatacgcgcgtcaattgactatccgaacgtcttcctctgacctgcgcgtgtggtagatatgtattccgcgaatatacgatgtcgagaaggaaagtggaaccggtgcagcagaacatgggacccgtcttgtgcgatccgcaaacgttgatcaaggatctcaatccgcagcagagcgaagcggtgaagtactacggtcaggcattgcttatcggcgcaggtgcgggatcaggcaagacccgtgtgctgacacgccgtatcgcatggcttctggctcatggcatctgggcaagccagattctcgccatcactttcaccaacaaagccgcggccgagatgagggaacgtctcgccgcactcgtcggaccggaagccgaacgcatgtggatttcgacgttccattccgcctgcgtgcgcatcctgcgacgcgacggcgaccagatcggcctgaaatccggattctccatctatgacaccgctgacagtgaacgactgatcaagctgatcggcgccgatctgaacattgacctgaagcgctatacgccgcgcatgattctcggcaagatctccgactacaagaactcactgatctcgtggaaggaccagctcaagacctatgccgccgattaccggccggggcaacgcggctaccagctgggacggttcgacaacgtcgaggaactgttcgccgtggtgtactccgaataccagtaccgtctggcccaggccaacgccgtggacttcgacgatctgattatgcgcaccgtcgaactgttcagaacgtgcccgcaagcgagcgattattaccggcacaaattccgttacattttcgtggacgagtatcaggacaccaatcacgcccaatacgtattggtgcgtgaactctccggcatcgattcgggcgagcaggccgatccgcatgccacgggcgcgggccgggtcggaccctcctgggttaccgtcgtcggtgactccgatcagtccatatacgccttccgcggcgccgacatccgcaacatccaggatttcgaagaggacttcccaaacgcgaagaccatcatgctcgaacagaactaccgttcgacgcagaccattctggatgcggcgaatgcggtgatcgcgaagaacgagaaccgcaagccgaagaaactgtggaccgcactcggcaaaggtgatccgatcatcggctatgcagccgacaacgcgcagcaggaggccggctatatcgcatccgaaatcacaaggctgcatacggaggaaggcatcgcctacagcgacatggccatcatgtaccgggccaacgcgcaatcgcgttcgctggaagaggcgatgatcaacgccaacctgccataccagttggtaggaggcaccaaattctacgaacgcagagaagtcaaggacgccatcgcatatttgcaggccatcgtgaaccccgccgacgacgtgaacatgcgtcgcatcctgaacgtgccgaaacgagggctgggcgcccgtgcggaagggctggtcgccatgtatgcggatcggcatggcacgacgttcttcgacggcatcgaacatcttgaccagatcgaaggcatgaccggacgaacggcgaagccattgggagcgttccgcgacctgatgcacgaattggtcgactttgcgaaggcgcatgacgccaaaccatccgaagtggtggcggaggtgctgtccagaagcggacttctggaggaactgcaacgctccgaagatccgcaggacgcctcacgcgtggataatctttcgcagctgcaatccgtagcggcggaattcgaacagaacacgccggacgccacattggcgggattcctggaaaccaccgcattggtggcggattccgatcagttgcccggtgagaacgaggattccggcaaggtcacgatgatgaccctgcataccgccaagggccttgaatatccggtcgtgttcctcaccggcatggagcagggtaccttccctcattcacgagccatggaagatacaagtgagctttccgaggaacgtcgtcttgcctatgtgggcatcacccgtgcgaaaaggcgtctgtatgtgacccgagcggcggtgcgtgcgcaatggggacaggccaacgaaatgatgccaagccagttcctcgatgagattccggaggatctcatcgattggaagcgtaaggaagccggcatggaacgcatgcgcggcggttggcagagcggcttcgacgatgacgacgaattcggcggttggggcgatgacgacttcggcacctcgtcgttcggcggctccggatatggctcacgtggcggatcctatggtggaacgacctcatacggttctcgctcttcgtatggaggatcgtcatatggctcgtcatcctcccgtggtggctcgtcctacggttcgggccgtgccgcgtacggttcgagttcgcgatcctcgtacggatcgtcttcctacggttccggcaagtccgccaaggccggcaaggtgaccacccgtcacaccaaaccgaaggcgcttgacaaaccgagaaccacacccgcctccgcactgagcaaggacaataacctcaatatcgaggatttccatatcggagacaagatcacgcacgaccagtatggcttgggcaccatcgtcgatacgcaggacaagggccgcaattccgttatcaccgtggatttcggcacggatggcatcaagcggctgatgctgcgcgtggcgcctatcgaaaagctctgagagctttcgacaggcgcccttcgcggcggtgccgctcacttcacctacgtggaacccactgggttccccgtttgacggttcagctatcgaaaagctctgagagctttcgacaggcgctttatcactacgaacgtgaaaagtcaagacttttctttcatggtcaacactgcgataatcgggcgttgcctgattatttgtcgagaggaaatcatgaacaagaaacttttcgcagccattgcgcagttcgtccttggcgtgctgatcgccgtcgccccgcgaaccttcgcccatgtgtgcgaggtcacggacatgccgatggcctgccattacaccgcgcaggcagcgctcggcatcggcatcgtcatcgcattgctcgccatcatcggtctgtttgtcgccgaagcgacccgcgccggtctggacatcgccaacgccgtactgggcgtgctggtgattctggtaccgaccgtgctgatcggcgtgtgcaagggcgcgatgatgcattgccacatggtgacgctgcctacgctgatcgtgctgggcgtactcaccacggtattctccgtcatcgccgcataccttgacctgaagccggcaaagcatcgctgatatgaatcatgtcacccttgccggcctgcctgtgacgaatctcaggcgcaagccgtttcggaccacggccctcgtcatcgtggtcaccatgctcaccgtcgccttttacggaggctccctgctgtcgatgaaccttgaagcgggattgaatagcatgcaggaacgtatgggcgccgatctgatggttaccccgcagaatacgaaaaacgaagccgaggcgttgctgacgaatggcggatcgagtaccttctacttcaccaacgacatcgaaaacgaggtatcgaaggccgacggcatcgacgaaatcaccgcacagacctacatttcgtcgctggccgccgcatgttgcgacgacaaggtgcagatcatcggcttcaacccgcaaaccgatttcgtcatcaccccatggatcggctcgcaattcgacggtgtgctcgaagacggccagatcatcgccggagccagcatcaacgtatccggaaacaacaccgtcaagctgtatgggcacgaattcccggtcgccgcgcagctggcgaacacgggtacgtcacttgacaattccgtattcgtcaatatgaacaccgtccccgacgtcgtttcctattccgcgaaggtcgggcatcccgccattccgcaggaatatgccgacaaagcggtctccgccatcctgatcaaggtcaaggatggctattccgcacagcaggtcgcctccaacatcaccaaagccacgggactcaaaggccttggctatgtctatccgggcggcatcaccgcaaccaccaagaacaatctgacggtcatcgtgggatatgtgacgattttcgtggccgtgttctggatcatggggctgatcgtactgcttgcggtattcgcctccgccatgaatgagcgcaaacgtgaattcgccgcgtaccgcatcatgggggccacacgctccacattggtgggcatcatcatcagggaatccgtcataatcggcgcattgggcggtgcaatcggcgtggcgctcgcttcgctggcgatcttccccttcagcacgctgatcggcagacagctgcaactgccttatctgcaatccggcgtgtggaacgtaatgctgctgatcgccgtgagtttcgtattcgcggtgattaccggtgtgatcgcatccatcgccaccgcggtgaaactgtccgcaccggaaacctatctgacgttgagggagggggagtgagcatgaacgtattggagctgcacgatctgacccgtgaattcacgcgccgtggcaagccgttcgcggcggtcgatcatgtgaacctcattctgagggaaggtgaattcatcgccatcgtggggcgttccggcaacggcaagagtacgctgctcaacctcattaccggattgctgcgtcctactgacggcacgatcacgcttgatgggcggaatatcgtcgccttacgtgacagacagatgtcggcgatacgcaaccgggtgatcggattcgtgacgcagagtcagacgttgctgccgaatctcaccgtaatcgataacgtgattcttccggcggtactcgagtccggcaatcaagagatcgatggcaacgatgatgctcaggagaacgatgatgccgagaagatgccttccggccagacgcaggtggacgacggtctgccagatgtaatcgcggcggcaccgatcgccacggatacggccgtccgttcttccgaccgtcttgtcgggcgtgcccgtgagttgctggaaatgctgggaatcgccgatctggccgactgttatccgaaggagctctccggcggtgagatgcgtcgcgtctccatcgcacgcgcgctgatgaatcggccgaagttgctcattgccgatgaacccaccggtgatctggatgcggcaagcaccgcaatcgtcatgcggctgctacgggatgtcgcgaatggcggtaccgctgtgttgatggtcacgcatgacccggacgctctggcatatgtggactacgtattccgcatggataggggagtgctgagcgaggcatagggcaagacatgccgaatgccaggctgttcgatgctagtcccgcccctgtgtgtatcattgacgattggtgtgcgtcttgtagacgtatgccgtctggagtcttagcccatcagtgggtcggcggccgaccttgtcgaaggttgccgttcgcgcttgccgcgaaggaagcactggagaggctggctcagcgcgggtcgagtgatcgacgcgcgttccgttcagacaacgacagaacaaacaaaggattaaaccaatgacgaacgttcagcgttctcgccgtcaggtgcgtctttcccgcgccctcggcatcgctctgacccctaaggctcagcgcatcttcgaaaagcgtccgtatgctccgggtgagcacggccgcacccgccgccgcactgaatccgattacgcagtgcgtctgcgcgagaagcagcgtcttcgcgctcagtacggcatttccgagaagcagcttcgcgccgcttacgagaagggcacccacaccgccggccagaccggtaacgccatgctgaccgatctcgagacccgtcttgacgccctggttctgcgtgcaggtttcgctcgcaccaccgcccaggcccgtcagttcgtggtccaccgtcacattctcgtcgacggcaacatcgtcgaccgcccgtcctaccgcgtcaagcctggccagaccattcaggtcaaggccaagagccagaccatggttccgttccagattgctgccgaaggcgtgcaccgcgatgtgctgccggcggtcccgggctacctggacgtcaacctgccttccctgaaggccaccctgactcgcaagcctgaagccgaggaaatcccggtgcaggtcaacatccagtacgtggtcgaattctacgcccgctgatctggattcacatactgtaagaacatacagtataaggacatacagcaagagcctcgccgccgttatggccgcgaggctctttgctatctgcgttatctgcggggattccgcaggtgctgatcagtccgcgaacatgccgccgataatgccgccgacgatggtggatacgatcgacatgatcagcgaaccgatgacggaccaccagaagccgtcgatgacgacgcccacgtcgaacaggctcatggccagccaggaggcgagctgcatgaacagccagttgatgatcagggcgatcagaccgaacgacagaatggaaaacggcaatgctatggcatgcacgatcggtttgatcgaagcattgatcagtgccatgaacagtgcgaacgccccgatgccaagaatcggagggtctccgatggcatgcatgccgggcagcagggcaaccatgaccccggccgctatggtcaaaaccagccaacgtgaaatgaaatgactcataatcccatcgtagtgcatgcgtttctcccacttcagcgggtagcatgaaagcatgttgcttcatctccatctcgtccgtcacggacagacgttcttcaatcgatacaaccgtctgcaagggtggtcgaattcgccactgacgcagtccggcatcgccgatgccgacaaggccgcaaccaagttgcgcgattacgatttcgccgccgcctattgttccgacaccacgcgcgcccagataaccgcgcagcgcattctcgacatgaatgagttggcagggcatgtccgtccggcgttgatcagcgacatgcatttgcgcgaacagttctatggatatttcgagggacaggacatgagcgtcgcatggactgctgccggcgggcctcacggggccaagaactacaatgacatcgtggcgaaattcggccttgcggccacccgtgactttctgaaagaggccgatccgttccatgacgccgagtccgatgccgaatactgggaacgcgtcgaggggggattttcgctgatcgccgcaaatccgttgctgaaggacggcgatcatgtgctgcagatttctcatggcaataccttgctgagtctgatgcatcgttatgcgcccgaaggctatgacctcagcgaacgaccggcaaacgggtcggtcaccagccttgatttcgacacggaacaaccaatcgatcaggcagtgaccgtcatttcatataaccagtgaacgaatttgccttccgtcgtggcttttgactactattaggcgggtattgtgttcgcgggtcaccgtgggacagaaaagaggtacatgatgggtgttggagaaatcgccggtctgattgcggcaatcgcgttcgcgattctcgccggtttcatgatctacccgttgatccgtctgggcaagctgttcgatcagatcgcgcagaccgtcaaggacaccggagaccatgcgattccggcgcttgacgaaagtgtgaccaccgtacagcaggtcaataagtcactggaggatgtcaacaagatctctgcggcagcctcgaccacggccaacaatgtgggcgccctgaccgacctttatggatccttccttggcaagccggtcattaagatcgcttcggccgtctatgctctgaagtccacggcacagtccttcatgaacaatcggaccgccgaccgtgcccagaacaagggggagtgatgttcaaacgtctcttttggatttccctgggtgtaggcatcggagtcatggccgtcaccaaggcgcaggcctatatcaaggccaatacgcctgacgtggcgcgccagttcctgctcggccctgatcaggaccacgtgaccgtacgcacgcttgaaggattggtcaacgagttcaatgccacgcgtcgagcccgcgaggctgaacttaacgccagatatgccgacaagatcaactgatcttcgcgcttcaatccgtataggcaacatttgtacaagacgttcggagggcatcagaccctccggcaataaaggagctcaatctcacatgcgcacttctgaaatcgcgaagcgctaccttgattatttccagaagcatgatcaccttatcgtgccttccgcgtcgctgatctcgccgaatccgaccaccttgttcaccatcgcaggcatggtcccgttcatcccgtacctcatgggcgagcagactccgccgaagaaccgtatggcctccaaccagaagtgcgtgcgtaccctggacatcgacgaggtcggcaagaccacccgtcacggcaccttcttccagatgctcggcaacttctccttcggtgattacttcaaggaggaggccatccattacgcatatgagttgctgaccaccccgcaggaccagggcggctacggcttcgatccggaaaagctgtggatgaccaccttcaccgatgacgaggaagcccgctcgatgtggaagaacgaaggcgtcgatccagagcatatccagatcatgggcatggaagacaacttctggaccaccggcggccccggcccaggtggcccttgttccgagatctacgttgaccgtggacctcaatacggcgtcgagggcggcccgatcgccgatgaaaaccgttatatcgagatctgggatctcgtgttcgaaaactatgaggtcgacaacgtcaagtccaagaccgacttgcatatcgtcggcgagctcgagaacaagaacatcgataccggcgccggtctggagcgtctcgcctacctgttgcagggcaagcagaacatctacgagaccgatgaggtcttcccggtcatcgaggccgcccagaagctgtccggccgtacctacggcgacgatgaggccatggacgtcaagttccgcgtggtcgccgaccatgtgcggtccgcccttatgatcatgtcagacggtgtgcgtccgtccaacaacggccgtggttatgtgctgcgccgattgctgcgccgcaccgtcaaggccatgcgcgccctcggcgtgaccgatccggtgctgccgaccctgttccccgtctccaaggaggccatggtcccgagctatccggagctggagagcacattccacgaggtatccgaatccgcctacggcgaggaggacgcattccgtcgtaccctcgagtccggcaccgagattttcgacctggccgtggccaaggccaaggagtccggcaagaccgtcgtttccggtgatgacgctttcaagctgcacgacacctacggcttcccgatcgagctgacccttgaaatggccgaggaacagggcgtgaaggtcgatgaggtcaaatttcgcgagctcatggccgaacagaagggccgtgcccgtgccgatgcgttgaagaagcgtcacaatgtggatctgtccgtctatgacgatttcaagaaaacgcttgtccagccgattgacttcctgggctacaccgatatgtcggcgcgcgcccgcgtgatcggcatcatgcaggaaggcaagggttccgtacctgccgtcaccggtccggccaacatcgaggtcatcctcgaccgtactccgttctatgcggaggccggtggccagctcgccgaccaaggtgagatcctttccgacgacggtgccgtgcttgaagtcgatgatgtgcagaaaccaatcaaggacctcatcgtgcaccagtgccgcctgaccgaaggcacgctggtggtgggcgccgaggtcaacgccaacatcgacctcgaccgtcgtggtgccatcgcacgttcccacaccgccacccacatggttcataaggctctgcgcgaggaactcggcccgcaggccacccagcgtggatccgaggacgctccgaaccgtctgcgcttcgatttccagtggtccaaggctccggcaagatccgtgatggacgccgtcgaagcccgagtgaacgatcgcatccgtgataacctgtccgttaccacacaggaaatgaagttcgatgacgccatcgccttgggtgccatgcacctgttcggtgaaaagtacggcgacgtcgtgcgtgtggtctccatcggcgaggatggctggagccgtgagctgtgcggtggtacgcacatcgaccacgtcggtaagatcggcgccgtcaacatcatgtccgaagcctccatcggttccggcgtacgccgtgtggatgcgctggtcggacagagcgcctacgaattcaacgcccgtgagcatgctttggtttcccagctttccgatcagctcaacgcccgtccggatgagctggccgaacgtgtgaatacgctgttggccaagcttaaggaatccgatcgtcgcctagccgccatgtacgaaggccagctggccgcttccgtgccggctctcgtcgccgatgccaaggcctctcaggctcccgtcaaggtggcctccaagaatgtgggacattttggttcctttgatgccctgcgcaagaccgtgctcgacgttcgagggcagcttggcgaggatatgccggtcgtcgtggctctcgccggcgtgaacgaagacggtaaaccgatggtcgccgtggccaccaacgatgccgcacgcaagcagggcatcaaggccggcgacctggtccgtggcgcctccaagatccttggcggtggcggtggcggcaagcccgacttcgctcagggtggcggctccgatgccaccaagatcgacgccgcgctcgaggctctggtcgatcaggccatgaagggctgaacctccgggcatggtatggcttggagttgacttgggtgatgccagggtcgggcttgcactgtccgaccccgagctcacccttgcccaccccgcgggcaatattcaggtttatggggattcattccgggcattggatgaggtcatcgacgtcattgaggacgaatcggtggatcatgtggtggtgggtctgccgttgctgttgaacggcgaagcaggcaaaagtgccaagaaggcacgacgttgggctgctaatctggaaaaaagaatgcgggcggcggcacaggatgagtcggaaccgctcaatgtcattccgacaattgaattggtcgatgaacgtttgaccacggtgaccgcgcaccagcaactgttcgatgcgcaaatcggtggtcgcaggcatcgtccgatggttgatcagcagtctgccgtagtgattctgcagacagcattggaccgcgcagagaggtacagaggagcgatcgatggctgagcatctggatgattttttctccgacaacgcacaatgggttgaacctgcgcaggagaccttcacctcggcgttgcctccggaaccgccgaaatctcgtcgtgacatgcgcagacaccgtgcgaaacgcaagcaccgtcgtatcatcacatggattgcggtcatcgtagtggtcgccctgattgcggtcggatcgattttcggcattcgcatgttgaagcattggaaggcgatcaacaccgccgatgagcagattcaggttgaggattattcaggtcctggagatcaggacgtgagctttaccgtggaatccgggcagggtgcttccgaaatcgcgcagaatctcgtcaaggccgacatcgtcaaatctgtcgacgcgttcaccaatgccgtgtccgcaggcgatttcacactgtatccgggaacgtattcgctgaagacgcatatgaaggcttccgatgtggcgaagatcctttccgatcagagtcaggccggtggtttcgtggaggtgagggccggcgaacgcgtgtccgatgtgatcaccgccgccgcacaggcttccggcaaggatgtttcggaattccagagcgtcatcgacggtggtggcgatggcattctgccgagtgaggcgggcggcaaattcgaaggctggttcgaaccgggaacctatgatgcccagaacaaatcggccgaagacatcatcaaggccatggtggaggcgcgcatagccaaactcgacaagcttggcgtgcccacgggaagcgaccgtgagcgcatcctgatcatcgcgtccatcgccgaatccgaggtcggcagcgagcaatactacgggaaggtcgcacgggtgattctcaaccgcatcgatgcgggcatgcccttgggcatggataccaccgtcgcctatggtctgggtatttccgccagccagctgacggacgaccagctgaacgattccagtaatccgtacaacacacgaatcaacaagggactgccgccgactccgatcagcaatccgggagacggtgccatcaccgcggccatggacccgccggaaggtaaatggctgtatttcgtgaccaccaatctgaagaccggtgaaacgaagttcgtcgaaaccgaagacgagttctggaagattcgcgacgaatacaagaacaacaacgaaaacgccaattagtcgcggttcaggtgctacagcagggcgcagattgcgatactgatcgccccggctaccacgattgccggggcgaacggcgttctgccggcatattgcgtatgtctctgcgggtcgaaacgggtccagaaggcgatccacagcaggccgatgacggcgatgaacagccaccacagcaccatggcgtacaggccgaacatgcctacgcccaatcccatgaccgacgtgacggtcacatcaccgaagccgagtgcccccggtctgatcagggcgagtgcgcactgcaggacggcggcgagcatggcgaagaggagggattgcagtgcgaggaacagcgcattgacggatagcgcgtagatgatgttcacgatgatctgcgccatgcagcccacggcaatccatgcgcggggaacacgacgcgcgcgaacgtcctcgacgctgacggccagtccacaaagcagactcggcaggcaaatcatgtaccacataccgttaagatagtccactagttgcattcggtagaaaaggagagggcatgttgcgctggcagacagcaggcgaatcgcacggcgaggcacttgtcgccatgatcgaagggctgcctgcgggcatccacatcaccacggaggatatcgtcggcgcattggcgcgccgtcgtctcggctatggccgtggtgcacgcatgaagttcgaacaggacaaggtgcgcatgcttaccggcgtacgttttggcgagaccatcggctccccggtggccatcgaaatcgccaatacggaatggccgaagtggacggaagtgatgagtgcggatccgcttgaccacgacattcctcgcgagggacgcaatgcgccgctgtcccgtccacgcccgggccatgccgatctgaccggcatgcgcaagtacggctttgatgacgcgagaccggtgctggaacgttccagcgcacgtgaaaccgcttctcgtgtggctttgggagaagtggccaaacagttcctcgagcagacgttcggtatccgtacggtctcccacgtgctatccatcggcggtgcgggcattaccgaccctgccgaggcggtgttgcccaagccggaagatctcgaggctttggacgcctcgccggtgcgtacgcttgacaagacggccgaggaacgaatgatcgcccgcatcgacgaggccaaagacaatgccgataccttgggcggggtgattgaagtcgtggtgtacggcgttcccgcaggcgtcggcacctatgtggagtccgatcgccgcttggatgcggctcttgccagcgcggtcatgggaatccaggccatcaagggcgtggaaatcggcgatggtttccttgaggccatgcggccgggttccgaagcccatgatgagatggtggtcggtgaagacgggcgcattgcacgcctgagtaaccgggcaggcggtattgaaggcggcatgtcgaacggtcagccgatcgtggtgcgtgccgcgatgaagccgattccgtccattccgaaggcgttgaggaccgttgacgtgaccaccggcgaagccgcgcaggccatcaaccagcgttctgacaacaccgcggtgccggcggcagcggtcgtggccgaagcgatggtgaggctcaccatcgccgcatatgtgctggagaagttcggcggcgacaacgtagccgaaaccaggcgtaacgccgagaactatctggcctcttggccggaacacatgaggtgatgcgtcgtgacgatgcataggcccgttgccgtgatcatcggcatgatgggggcgggaaagacccgcgtcggcagagaagtcgcgcagatgatgaatctgccgttcctggatgccgacagcgagatcgaacatgacgccggcatgaggattccggaatatttcgaacgctatggcgaaccggcgttccgtgatcttgaaagcgatgtcgtacttgacatccttgaggatttcgacggtatcttctcgctgggtgggggtgcgccgatgaccatatccatccagaaggggcttaccgactacatcgcggacggaggcaaggtcgtctatctgatggccgaccccaaggaagccatggagcgagccaatcgtggcggtggccgaccgatgctgaacggcgatgccaacgagcgttggaagaagctgtaccgtgatcgtgatccggtattcaggcaggtcgcgaacgtgcatgtgcgcacgcatggtcaaacgccgcaggccgcggcgagaaagctgatggatatgatcgctcaacgaaccgtacatgtcaccggtgccacgatcgagccttacgacgtgagcatcggcgaaggtgcgatgaaccagcttgcgcaggtattgggggacaagccctccaaagtggcgcttatccacacccagccggtgcagcgtcattccgaccgggcacgcaccttgttgcgccagggcggatacgaagtgtatgacatcgtgattcccgacgccgaagccggcaagaccatcgacgtggccaacggcatctggcagcgtctgggagacgagggattcacccgttccgatgcaatcgtcggtctgggaggtggtgcggccaccgatctggccggtttcgtagccgccacatggatgcgtggcatccgctacgtgaactgtccgacatccttgctggccatggtggatgcctccactggcggcaagacgggtatcaacacgccacagggcaagaatctggtcggttcgttctacacgccggccggcgtgctcgccgatatgaaaacgcttgtctccctgcccaatgacatcttcatcgaaggtctgggcgaggttgcgaagtccggtttcatcaaggaccctgagattctgaggattctcgaagatcatgccgatgagctgcgttcctttgacggcgctaccttccttgattccaatttgaaggaagtcgtcgccgagctgatcgaacgcaccgtgaccgtgaaggcctatcatgtatccgccgacctcaaggaggcgggattgcgtgaattcctgaattacggacacacgctcggccatgccatcgagaagctcgaacatttccgctggaggcacggcaacgccgtcgcagtcggttgcatctatgccgccgaactgtcacatctgctgggctatatcgatcgggatctggtggactatcatcgttcactgcttggctcgctgggcctgccgacctcgtggaacaacggaacgtgggatgatgtgctcgccctcatgcaccgtgataagaaggcccgcggcaacaagctgcgtttcgtggttctcgacggcatcggccatccgattcatcttgaggatccgccggcggatgccgtcgaagaggcattccgccgcattcagcactgacatggccggcggaaagcggcagacaagaatcgtaaggaagtgatcatgaccaaagtagtggttgtcaacggaccgaacctcggtcgcctcggtgtacgccagccagacgtgtatggcaggcaggatcttgagactctgcgcacactgtgcaccgaatggggcaaggaactcggtcttgacgtggaagtgcgccagagcgatgacgaggccgagatgatcggttggatgcatcaggcggttgacgagaaaacgccgatcgtcatgaacccggccgccttcacgcactactcctacggcttggccgacgccgcccatatggtgattgatgaaggcctgccactgatggaagtgcacatctccaacccgtccgcacgagacgagttccgtaagcgctccgtgatttcgccggtcgccaccggtaccatcaccggtatgggattctacggttacaagctcgccctcgacgccgtggcccatctgcttgaagacaggtagaatcgcctggttgcacatgatgtcgcagtcggatgccggaggaaacggcatccgactttcattatgccgtcacggctttccgaagttccgatacgtcttggacaatgagtacgaaaccggatggcagaatgtcgagaattgcgtcagttcatgaaaaataatcgtgtttgcagcaatacggcaagaatatattgccatgattgcatacatgaggggaagtgcttgtgacggattgcatacgggcgattcgaagtttggcttacggcacaaggggtcacgctgtttcattgccttacgcagcttttccggtactataaagcgcaacttaaggtgcaaacgtatgcacattcatcgcagagtgtgtcttgggttgctcgctaccggcgagtgcaaatgacgcatacgttgtcagacgatggggttctgttgaggaactcgttcgctgatctcgatgatgagaacggagagttatggccgtccagaatcgaccgattggccgggtggtggcgattggcgtcgccgtggccatgtcgtgtgccgcgcttgtggtgccgacaatggcccaggcccagtctgaagcgcggacgagcgcgaagaaggatgtgcaggtcatcgccttccagcaaagctggaacacgattgccaaggaatgcaccgacacctatggacctgaaggcgtggcatatgtggaagtgtcgccgccgcaggaatccattcaaggcacacagtggtggacgagttaccagccggtgagctacagacttgattccaaactcggcaccgaggccgaattcaagaacatgatcaagcagtgcaacgccgccggcgtagacatcatcgccgatgtcgtaatcaatcagaccaccggttccgacgtcgcagccggagaacagaagggcgtggccggcagtgattacaacggctccaccggatcctatccgggcttcgccaccaagcggtatccggacggcatcaccgcctccgacttccatagctgcaccaagaacatttccgactacggcaaccagtgggaagttcaggaatgccgcctgagctccatgtgggatttcgactccgaaagcgagaaggtgcaggacatccagtccgattacctggtatcgctgtggaatgccggcgtgcgcgcgttccggatggatgccgtcaagcacatcaataccagcagcatgaaggcgatcaaggagaagttcgcgcagaagatcggcaagaatgcggatgacatctattggattcaggaagtcatcggcaactcctcagaagccgcgggcattcagccaagcaattatgtgcagaacggcaccgtaaccgaattcggcttcaagtccgagatgaatcaggctttcaaagacaagatcgccaatctcaaaggactggatgaacggctgagcaaggatctttcctccgaagacgccaacgtgttcgtcaccaactgggacaccgcacgcaacgaaggcgcactgacctataaggacggtgccaagtaccagctggccaacgccttcatgctggcctacgattacggcaccccacgtctgatctccgattacaagtggagtaacggcgacgacggtgcgcccggagcgaccgcaacctccgtaccggacgtggacatggacaaggtctgctccaccaatgattccgactggaactgcgagcaacgctggacctccacccgcggcatgatcgccctgcgcaactacgtcaacggcaccgaagtgaccgactggcaggacgacggtggggacaacatcgccttctcccgtggcaacaagggcttcatcgccatcaacaacggcaagaacgacaaggacgcgtcatacgcgacatccctcgcggacggcgaatactgcaacgtgtacgccaccatggattgctccaagaccgtgaccgtcaagggcggcaaggtggaggctaccgtaccggcgcattccgccattgcgttgtatgccggatccaccaaggactcgcacccggcctcctccgcgaccaccgatccgtccgatcccgacgtgagccaggaggaagatgacgcactgcccgatgacaggagcgtcaccatctactacaagcccgccgactccagctggaagaccccgaaggtccactacggtctcggcgacgaatggaaccaaccggacgccgatatgatccttgatgcgcaaggctattacaccgccaccatcagcaccaaaggcaagaagatcgacttcgtgttccacgacgcggataccgaccagtgggagaacccgaagggcggaggcaattactccgccaacgcgggcatcacctatgtgggcgtggccgaccagacctcgaccgtgggcaaccccgaatccatcggcgggcagacacgtctcgtcgtgcactacaagccctccggagactcggacaatcgcggcgtgtacgtgtggggcaccgatgcgaacggtgccggcatgagcgccgaacaccacgcattcaccggcaccgattgctggggcaaggtcgccgtgctcaccttcgacggcaagtatgacaagttcggcttcatcatcaccaccagcgagtggaacaagtatggtgccgaccgcagtgccacggtaaacgccgatggcaccgccgaggtgtggatcgatggcaccaagtaccaggatcagggcgaatcaaccaccatcgagaccctggattcggcaccatcggactatgcgtgcaaggccaacgccgtcacggtaaaggtccactacaaccgcgacgacggcctgtactacaacgccgaagacaccagcgtcaccgttccgcagtgggacatctggacctgggcctccaattggaacggcggggctgccaccttcgcctctcatgacgattggggagaggtggcggaatattccttcaccaactacacctactacaacaacgacggcgtttccgatatcggcatgctacgccgttacggcaaggacgcgtggaaggccaaggatccggatgattccgatcataagatcccctccgacgcactcgtgttcgatgccgacggcaatgcctccgccgaggtgtggctgatgagtggcgacgctacggtgtactcctcacgcccatcccttggggcttccgtgaagtccgccgagatttccgacactaaccagttgtccgccaaactttccaagaaggtctccgcggacgacctggacggcaagatctccgtcacggacgccggcggcaagagcgtcaagatcaagaacgtcaaaaccgacggcaacaaggtgatcgtcaccaccgacaaggatcttgacgttcgtggcaggtacacggtcgaagtcaaggacttcggttctcaggacgccatcgccggcgcggtggtccgtacggacgccttcgacaagaagtacgcctacagcggcgatgacctgggcgcgacgttccagaagaaccagaccggtttcaaggtgtgggctccgaccgccaccaacgtcaagctcgttacctacaggtccgccgatccgaacgccgaagtcgacaagaccatcgacatgacgggcgaagacaagggcgtgtggagtgccaccgtgaagaagctggcctccggcacggcctacgcctaccagctcacctttgcggacggcacggtgaacgtctccgccgatccgtacgccaccgccgcggtggccaacggcgagcgttccgtcgtgctttcccagaaggacatggattccgcaggcgatcgcatgccggccttcggcaagaccaccgacgccaccatcgctgagatgaacatccgtgacttctcaatcagtccggactccggcatcgccgccgacaggcagggcaagtacctcggtgtcgtgcaatccggcacgaagaccgccaagggtgcgacttccggcctggactatctgaagtccctgggcgtcagtcacgtgcagatcatgccgatgtacgactacggttccgtcaacgagaccggtgacctgagctacaacgccgccggcgcgcagaactggggctacgatccggagaactacaatgtgccggaaggttcgtattcctccgatccaagcaatccgagcacacgtgtcgccgaaatgaagcagatggtcaaggaactgcacaagaacgacattcgcgtgattatggatgtggtctacaaccatgtctataacgcggccaaccactcgttcaacaagacggttccgggctactacttccggtacgatgccaacggtgcgctcgtcaacaattccggttgcggcaacgataccgcctccgaacgcaagatgatgcgcaagtacatcgtcgattcggtgacctactgggccaagaactacaacgtagacggcttccgattcgatctcatgggtctgatcgaccttgagacgatgaaggaggtccgtgccgcgctcgacaagatcgatccatccatcatcatcctcggtgaaggctgggatatgaacaccacgatggataagagcaggatgaccatccaaccgaacgcctatgaagtggcctccaatggcaagaacaacggtatcgccttcttcaacgattccattcgcgatgggatcaagggttccgtattctccgacaccgacacgggcttcgtctccggcaaggctggacaggaggggctcatcgcgtacaatgcgctcggatgccggtatgatgcggatgcggatacgacctgttggaacggcaatgcgcaggatcattacgcggatgccggtcaggtggtcaactacgccgaaatccatgacaacatgaccctgtacgacaagctgcgcgcctcggtcccgacggatgacgatgccaccaccgtggcccgtgccaagctcgccgattccatcgtgtacctgtcggaaggcatcccggccatccagctcggtcaggaatttctgcgcaccaaaggcggcaacggcaacagctacaacaccggtgacgccatgaatgccatcgattgggaccgtaccacgcagtatgccgactccgtcgactacgtcaagggtctgatcaaactgcgcaagcagatcaaggcgctacggctgaccgactacgatgatatcggcaaggatgtcaaactgatcaagtccgccgacggcgtggtggcctatcgggtcaaggacgagagcggcacgtacgtggtgatcttcaacgccaatgccgatgccgccaagatcgaaggccttgattccggctcctacaaaacgctgatcgccgatggcaaggtgaatgccgatgccgccaccgtgaccgtggacaaggacggttcgtatgccgccggcgcgttgtctgccaccgtgttgcagcttgacacggcgaagaaggacggcggcaaggccgacaatggcaagactgacaatggcaagaccgtcccggtcaagccatccgccaacaagccgtcttccaacggcgcgaagggcgcatcggccgcatcggccggagtcgccgcgaccggcaccgacatatccggcatcatgctggtggcggtgttgctggccatcgtttccggaaccgtgctgatcgtgagaagcggaaaggagaacagcctatagccaatatgatcgtttgaacgttgttccactcctgcagggtggggtcgtcgtaatggaaggcgaccccacctttcccatatggtcgaaacacgccgcgtcatgcgtcgatgataggctggagttccatggttagaagacaacatggcaattctcaagagcacgttaccaagcatattttcgtcaccggtggcgtggtttcctctctcggcaaaggcctgaccgcctcctccctcggccgcctgctccgtagccgtggcatcaaggttttgcagcagaagctcgatccgtacatcaacgtggatccgggcacgatgaatccgttccagcatggtgaggtctacgtcaccgaagatggtgccgaaaccgatctcgacatcggtcactacgagcgcttcctcgacgtatacctaagccagaaggccaatgtcaccaccggtcagatctatcaggaggtgctgcgcaaggaacgtgccggcgagtatctcggccagtgcgtgcaggtcattccgcacatcaccaatgaaatcaagtcccgcatgcgtgcccaggcctccgatgacgtcgacgtgatcatcaccgagatcggcggcaccgtcggcgatatcgaatcgcagccgttcctcgaggccgcacgcgaagtgcgtcgcgacctgggtgccgacaactgcatgttcgtgcacgtctccctcgtgccgtacattgcggccgcccacgaactcaagaccaaaccgacccagcattccgtgatgatgctgcgccagctcggcatctccccggatgccctggtgctgcgctccgaccgcccgctcaaccagtccatcaaggacaagatctccctgatgtgcgacgtggattccgaaggcgtggtcaactgcgtggatgccccgagcatctacgacgtgccgaagaccctgttcgacgaggggctcgacgcctatgtcgtgcgtgagctcggtctgccgttccacgatgtcgactgggatgagtgggaggatctgctcgagcgcgtgcaccatccgaagcatgaggtcaacgtggccatcgtcggcaagtacatcgacctgccggacgcctacctgtccgtcaccgaggccatcaaggccggcggtttcgccaactgggccaaggtcaatgtcaagtgggtggccgccgacaaatgtgccaccgaggaaggtgcggcagccgcactcgaccaggtcgacggcatcgtgattcccggcggtttcggcatccgtggcatcgacggcaagatcggtgcactgcgttatgcccgtgaaaacgggctgcctgcccttggtctgtgcctcggcctgcagtccatggtcatcgaatacgcccgtgacgtactcggcatcgaggatgcgaattcttccgaattcgagccggactgcgcaaatccggtcatcgccaccatggaggagcagaaggatatcgtcgccggtaacggcgacatgggtcacaccatgcgtctgggctcctatccggccgagctggaggaaggctccatcgttgccgaactgtacggcaccacgcatgtcaccgagcgtcatcgtcatcgttacgaagtgaacgtggcctacaaggaccgtctacgcgaagccggactgcgtatttcaggccaaagccccgacggtgagctcaccgaattcgtggaactgcctcgtgaggtgcatccgttcttcgtggccactcaggcccatccggagttcaagtcccgcccgaccaagccgcatccgctgttcgcgggtttggtcaaggccgcacttgaccaccagcaggcacgctaagtgaaggcattcgggggagtcgataaatcggctccccgttttgttatatacatcacgttggtcggaagccgaatttcgaatgggtcactggtatttagccatgcattctgttaggttgtcataggtactaatcagtgaatggaggcagcgtacggtggcagaaaaccaagcgcctaacgccgcggctgacgtggagatgagtcagtatgtggctgatcgttcgcgtgtgaacgaagacaagatcaaacaggatgatgaaatcatccagcagttcggtgactacacctatggctggcatgatacggacttcgcgggcgaagcggcgaagaaaggcatcgacgagaacgtggtacgtgccatttccgccgataaaaacgagccggaatggatgttggagaagcgacttgaggggtatcgtgacttcatcaatcgtccgatgccgcaatggggcgtcgatctgaaggatttcgacgcggacgatttcaagtactacgtcaagccgatcgacaaacaggccacgacctgggacgagctgcctgaggaaatccgcagcacctatgacaagctgggcattccggaagccgaaaagagccgccttgtttccggcgtcgccgcacagtacgaatccgaagtcatctacaactcgatccagaaggagctttcggatcagggcgtgatcttcgtcgacacagacaccgccgtgcagcggtatccggaaatcgtcaggaaatacttcggcaaatgcattccgagcaacgacaacaagttctcggcgctgaacaccgccgcatggtcgggcggatcgttcgtatacgtgcccaagggtgtgcatgtcgacatcccgctgcaggcttatttccgcattaacacgccgaatatgggccagttcgagcgtacgctcatcatcgccgacgaaggctcctatgtgcattacgtggaaggctgcaccgctccgatctactccaccgactcgttgcattccggtgtggtggagatcttcgtggagccgcatgcccgcgtgcgctacactaccgtgcagaattggtcgaacaacgtgtacaatctggtgacccagcgtgcctacgtacgtgagggaggcactatggagtgggtcgacggcaacatcggctccaaggccaccatgaaatatccggcctgcatcctcgccgaaccgtacgccaaggccagcaccatgtccctgggattcgccggcaaggggcaatatcaggataccggtgcgaagatgatccatctcgccccgcataccagctccaccatcgtagccaagtcgatttcccgcggcggcggccgttccgcctaccgtgggctggtcaagatcgtcaagggcgcggagggctcctcgaactcgaccgtgtgcgatgcattgctggtcgacgaattcagccgttccgacacctacccacatgtggacgtacgtgaggatgacgtgtccatggcgcatgaggcaaccgtctccaaggtctccgaagaccagttgttctatctgatgagccgtggcctttccgaagacgaggccatgggcatgatcgtgcgtggcttcgtggagccgatcagccgcgagctgccgatggaatacgcactcgagctgaatcgactggtggaactgcagatggaaggatcggtgggctgatcaccatggcacaaactcaggaaatcaacattcccgtcgcggatccgaacgattcgtatgcgaatccggcggccatgccgtcctcggccgaccgcgcgccgcgctccttcgacgtggaggccttcgccaagcccgatcgcacccaggaggattggcgttatacgccggttgaacgtgttgaggaattcttcgacacgttccagccttccggcgataccgaaatctccgtcagcatgattgacggagcgccattggccgatggcgcgaccttcgagcgggtcgcattgggcgatgccggtaccggcatcgtctccaagccgaatgaccgcgtctccgccgtggagtggaattccggcaagcaggcgacggtgctgaaactcgaaggtgagatcgaacagccggtactggtcaaagtgcacggcaatggctttgatatggacgccttccatctggtcatcatcgccgcggaccatgcgcatgccgatgtggtcgtggaacatgacggcgacgcccgcatcgccgaaggcgtggaaatctccaccggcagggattcgcacatctccaccacgttcattcaggagtggaacaagggttccaagcaggtcggcaatcagcgcattcacatgggggagggcgcctcgttgcgtcattccgtggtgacgctcggcggcgacgtggttcgcatccgcatggatcaggacttcggcggcgagcagggtgatctcaacatgctcggcatctacttcgtggatccgggcgaacacatcgaacatcgcaccatgatcgtgcacaaccatcccgaatgcagaagccgtgtggtctataaaggtgcgcttgacggcaaggatgcgcactccacatgggtgggcaatgccctgatcgcgccgaccgcgccgggcaccgattcctatgagctcaatcgcaatctggtgcttacgccgggcgcgatcgccgattcggaaccgaacctcgaaatcgagaatggcaatatcatcggcgcgggccatgcatcgtccgtcggacggttcgacgatgaggagctgttctacctgcaatcccgcggcattccggaggtcgaggcacgcaagctcgtggttcgcggcttctttggcgaactcgtcgaggagatcggcattcccgccatctccgagcatctgatgaccgtcatcgacaggcgtctgacacgcggcgaaagcgacgcgatggcgcaggtattggaagagaagtaaggaatcgtaggagcataacatgtcaactcttgaaatcaaggatctctatgcgcacgtcgaaaccaaggatggcatcaagccgatcctcaaaggcgtgaacctgaccgtcaactccggtgagacccacgccatcatgggccccaacggttccggcaaatccacgctggcctatacgttggccggccatccgaagtacatcgtcgattccggccaggtattgctcgacggagaggacatcctcaagatgactccggacgagcgcgccaaggccggcatcttcctcgccatgcagtatccggtcgaggttccgggtgtgtccatgaccaacttcctgcgcaccgccaagaccgaagtcgacggcaaggcaccggccattcgcacgtggaccaaggaactgaccgaagccatgaagcgtctgagaatggatccgaaattcgccacccgctccgtgaacgaaggcttctccggtggcgagaagaagcgtgccgaagtactgcagctcgaactgctcaagcctaagttcgccatccttgatgaaaccgactcgggccttgacgtcgatgcgttgcgcattgtctcagaaggggtgaaccgcgccaaagaggccaatcagttcggcattctcatggtgacgcactacacccgaatccttaagtacatcaagcctgacatcgtacatgtgttcgccgcgggacatttcgtcaaaacgggtggtccggaacttgccgatgaactcgaagagaagggctacgacgcatatctgccggaaggcgccgattccgaaagcgcgctggcatgacggattttgcatcgatccgtgaggaattcccgattctggaccagcagattcacgggcatccgttggtgtatctggactccgccgcgacctcgcagaaaccgcagtgcgtgattgacgcggaggcggaattctataggacgatcaacgccggcgtgcaccgcggtgcccacgaacttgccgcgcgcagcaccatggcgttcgaggaggcccgcgccaagatggcccggctggtcggcgccaatgcggcgaaaggcgaggaggaggtcgtcgtcacctccggcgcgaccgcagggctgaatctgctggccacggccttcggcaatgcctcgctcggtcgtggaggagcggcggccaaacgcttcgccctcaagccgggtgacgagatcgtggtgtccaaagccgagcatcattcggtgttgctgccattccaggaactggcggcccgcaccggagccagcctgaagtggttcgatttggacgatgagggtcgtatccgttccgatagcgccgacgaggtgattaccgaacgcacgaaaatcgtcgccgtcacgcatgtggggaacaccaccggtgccatcaccgatatcgcacccatcatcaggcgtgcgcatgaggtaggcgcggcgttcatacttgacgcatgccagtccgtaccgcatctgaaagtcgatttccatgctctggatgtcgatttcgccgcgtggagcgcacacaagatgtacggtccgaccggtgtcggctttctctatggcaagcgggacatgctcgaagccctgccgccggcgaatttcggcggatccatggtagaactcgcatggatggaccaggaagcgcggtacatggaacctccggcacgttttgaggccggtacccagccggtcgcccaagtcgtggccgcgggcgtggccgctgattggttgatgtccatcggcatggagaatctcgaagcgcatgaaaggaccatcaccgacgaactgctcgcgcttggcgacatcgaaggtgtccgcattcttggaccgcgcagcaatgagcgtcgcatcggcacgatcgcgttcgaggtggagggcgtgcatccccatgatgtcggccagttcatcgatgcgcagggcatcgccatccgcgtcggccaccactgcgcgcagccggtgcaccggcatttcggcgtgtatgcttccaaccgtgcgtccagcggcatctacaatgccgttgaggatgcgcaggcgcttatcgaaacggtgaaacaggtccgtccgttctttggagttaagtaaaccagtatgaatgaatttgcaatgtccggcgacgatctcgagcagatgtatcaggaagtcattcttgaggcggcccgtgatccgcacggcaaggagcattttgcgcctgatttggcgtcggaaaacgcctcgcaggcaggggataccatcgtacaggcgagtcacgagtactgcacgcccggcgaatcccaccagtttaatccgacctgcggcgacgaagcgaccgtgcatgtcgaggtttccgacaacgaacctcacactatcgagcgtctggtatgggacggccacggctgctccatttcgcaggccagcctgtcggtaatggtcgacctcgtcgaaggcaaaagcgtcgacgaagccatgcatctggccgatacctttcatcggttgatggaatcacgaggcaaaggtcttgacgatgagcatgccgaggaggaattggaagacggcatcgtgttccaaggtgtttccaagtatccgatgcgcatcaaatgcgcattgctcggctgggaaggcatgaaggattccgtggccaaggctttggcggccacgagctgatacggcggcacgtcggcgtccccggtggggctgtgttcggcgatgaacgaaacgccgatgacaaacccgcccccgaagcgataatctactcaacagcattatccgtgagtgtaatggagcgacaatgagcgaaaacctggtgcccgagccgcaggcctccgtgtttgattccgtggccaaggctttggacaatgacgaagacgctgcgcgtcgcgtcatgcttaaccctaatctggccaaaggattcaaggatggcaagccggtggaagtcgaacataaggagactccgcagcaggatgcctgcggatgcggtgaccatgccggagcttgcggctgtgaagacgggcaggatgacggaatctcgctgaaggccttcgacgagatcggccgcgcgaccgcagccgatgtgaaggaggccctgcaccaggtcatcgacccggaactcggtatcgatgtgatcgatctgggattggtctatggcatcgaaatcgatgaacttggtcgtgccatcatcaccatgacgctgactacgccggcatgtccattgaccgatctgattgaagacgaatgcgccagcaccttggcaggtctggtcgaggaattccgcatcgattggacatggcagcctcgctggaccatggagaagattacgccggagggccgcgagcagctggcggccatcggtttcagcttcgataatctgccgaaatactgattgttcgccggtgatttccggaacaatgtgattgcgttgcggcctgtgccatgatgcaatggtttgtgcagatgaagaaaggcgtgctcccgattggttcgggaacacgcctttttgttcgtgttgcggagcgtcagtcgtcgacgacggtgcccttcggaaccacggtgatgccgtccggcgtgaccgtgaagccacgggccagatcatgctcggtatcgatgccgacggtcgaattttcggtcagcacgacattcttgtcgagaatggccttgtatacacgtgcacgacggttgatggtcacattgtcgaacagaatcgaatcgacgacctgcgaccacgagtggatgcgcacattcggcgacagtacggaatgatgcacctcgccaccggagacgatgacgcccggggagacgatcgagtcggtggcatgacccagacgatcgcgaccggcatggacgaacttcgccggcggcaggttgccggacagcgtataaatcggccattcggtgttgtacaggttgaattcgggcacataggaaatcaggtccatatgtgcatcgtagaactgcctcaacgtacccacatcgcgccagtaggcgtgatcggtcggcgtggcccccggaatctcattggaattgaaatcatagacgccggcctcatggcgggccgcgaagtacggggcgatgtcaccgcccatgtcatgcttggtgtcctcggccttctcgtcaagcgacagggcctcgaacagagcatcggtgttggctacgtagttgcccatggaagcgaggatggaattcgggtcatccggcagaccggtggtggtctgcggcttctcctggaagctcttgatcatgttcggatgctctgggtcgacctcaatcacgccgaactggttggattggctgattggctgacggatgccggccacggtgaactccgcgccggaatcgatatgctgctgcaccatctgctggaagtccatgcggtacacgtgatcggcgccgacgatgaccacgatgtccggctgtacgtcctcgatgatgttgatggtctggtagatggcgtcagcggaacccagataccagtgcttgccaagtcgctgctgagccggcacaggggagacgtagttgcccagaagcggcgagaagcgccacaccgtcgaaatatggcggtcaagcgaatgtgacttgtactgggtgagcacgacggtctgcatgtaaccggaattgaccagattgctcaacgggaaatcgatcagacggaacacgccgccaaacggaacggccggcttggccctatcccgggtcaggggcattagacgcgtgccttcgccacctgcaagtacgatggaaagaattttcggattcttcgccatgagaactcctctcttagagcgtcatatcgacaccgcacaacttcgttcggaatgcttcttcgcaaaccgcctacgcacacaataattgcatattttctgcaacttgcaaggcattcgccccgcgagtctcgaactttttcaagacttttcagcgaattgcggttgaatagaaagccacggcgctcgaagccgctacgttgaggctgtccacaccgtggctcatgggaatcttcacggtgaggtccgcatgggatatcgtatgatgcgacaggccatccccttcggtgccgaagatcaacgccagcctgtcgatatggtcggtctcggccggcccgttgttgagtctgcgtaccagttcgtccagggagacggaatcatcctccaatgccatggccacggtggtgaaaccaagatcatgcagttcccgcatgccggtgaatggccagtaatgtttgtcatcgccgccgatgcgggtccacggaatctggaacaccgtacccatcgacacacgtgcggcccttcgatacagcggatcgccgcaggagggggtgaccagcacggcatcgacatcaagggccgcggccgaacgcatcagcgcaccgacgttcgtgtggtcgacgatgttctccatcaccgcgatgcgccgcgccccacggcatacctcttcgacgctcggcagggtccaacgcctcatggcggccaacgcgccacggtgcagacgatatccggtcagccgcttgagctgttccggagacgccacatacacgggaatgtctccgccccaatgttcgtcgatgcaggcgaaggtccgagacatgccatcgatccacggttcctcgaccagcagtgagatcggctcgcgtccggatgccaaggcgcggtcgatcaccttgggtgattcggcgatgaacagtcccttgctcggctccaacctgttgcgcaactggatttcagtgagattggtgtaggcggcgacacgctcgtcgtcgatggaatcaagatggatgaactgcatttcgccggctttcgctagatacaagaaaaccccttgtttccaaggggtttatccggtgtccggagcgggacttgaacccgcacgcctgtataaataggcactagcacctcaagctagcgcgtctaccattccgccacccggacaggtgcttgttgctcgcggcaacgaatgaaaactatagcagctgatttcagccgtgcaagtctcggcgtgtcgctcgattgtcgccggcattgcatggggtgatgataggctcgggagctatgactgaagcccttttcctgcttgatacggaacatgatgacgtgccggtgaacagcgacgagctcaatgccggttggaagttgacgttgcccgcttcggtacgacgtcatgcgattcaggccatgcgtttggaggacggcgacgaactgcagctgtccgatggcaaagggcttcgcattcatgccgtgttgcgtgatgcgcagcaaggcatagcggaagtgctgcgattcggcagggaatcccagccgaccatcaggcttgcattggtgcaggcattggccaagaccggccatgacgaacaggccatcgacaccgccacgcagatcggcgtggatgaggtgattccatggcaggccgaccgttccatcgccaagtggaaagcggggcgcacggataggaagtggcgtcaggtactggtcgcggcgacggaacagtcgcgtcgttcctggtctcccgaattgggggagtgcgtgaccagcaagcaggtggtcgccatctgcaggcgcgcctgcgtgcacggggacttggtgatcattctgcatcaggatgccacgaaaacctggattcaaatcgagcaggccattgccggtctgtcggataagtgcctggaagacggccgtcggcgtaccatctatgtggtggtcggtccggagggcggcatcagcgatgccgaagtcgcttccttcaccgaggccggcgccgaagtgtgcgtgttggggaacaacattctgagggcttcgacggcggggcccgtcgcgttgtcgttgcttgcccgcgcgctgggtcgcttcgcgtgacgccgctgtatggggtttatcccggttgggcaatagcatggaggcaaaggttcgcaaacgaaacgaaggagcgtcatgagcgattcggattgcctgttctgcaaaatcattgccggtgagattccaagcgaaaaggtgtatgaggatgacaccacctatgcgttcagggatatcaatccgaaagccaaggtacatgtactcatcgtgccgcgtgagcattatgcgaacgtcgccgaactggctgccgatgatgccgatcagctggcgcatatggtcaaggtcgcgcagcggattgccgacgacgaattccatggtgactaccgtctgatcttcaacaccggtctcgatgccggccagaccgtattccatgtgcacgcccacgtgctgaccggtgagaagctcgacgaatagttcccgttccgctttccgacgtcaaaacataagaagaggttttgtggctaccactacacgtaccatcacgattccccggcagctcgatccggtgacggttctcggcccgatcgacgaggtgctccgcgaagtcgagagggcatttcccgatctgaccatcatcgtacggggcgatcgcatcgcgatcatgtcacgttccaagcagtctgaggcgcaggcggcgcaggccgaagatgtgctcgccgacatcattcaggccgcgtatacggctccgatggatgccgataccgtgcggcgcatgcttgaccagaacgtactgaagaattccgtgcggcaatcccatcccggacacgggcgtgtggtggaggagttgcgtctgcagaagcatgcgcagggcgcggccattgcccgtgacgaaaccgccgatcgacgtaagccgcatgttccgggagtcatcaccttcgccttgggcaagccggtacgcgcgaagacagccgggcagatcgcctatgtcaacgccatcgaatcgcataccatcaccttcgccatcggtccggcaggcaccggcaagacctatctggccgtggccaaggccgtacgagccttccaagatcggcaggtgcgtcgcatcattctgacgcgaccggccgtggaggcgggagagaacctcggcttcctgcccggcacattgaacgagaaggtcgacccatacctgcgcccattgtacgatgcgttatccgacatgcttggggccgaccagctgaagcggtatatggatgacggcgccatcgaagtcgctccgctcgcctacatgcgtggacgcacgctcaacgatgcgttcgtgattctcgacgaggcgcagaacaccacggaacaacagatgaagatgttcctcacccgacttggtttcaacaccaagatgatcatcaccggagacgtgacgcaggtcgatctgaccgtgcccaagtcgggactcgccaccatcgaacgcatcctggacggcatcgacgacatcgctttcgcccaccttcagccggaagatgtggtaaggcatgccttggtaggcaaaatcgtcgcggcctacgaccggcatgcggccatcgccggagatcacagcagacagggacgcaggcacggcaacgagatcgaaacaaccgaaaggaacgaacacgccgatgagcgttgaagtcacgaacgaaaccatctggcaggtcgacggcaaggtcttttcggacctcggcgtctgggtgatggaccagatgcgtgtcagcacgcagtccgacctgaccatcatgttcgtggatcccgatccgatcgcccagctgcacatgcgctggatgaatcttgaaggtcccaccgacgtgatgagcttccccatggacgaactgcgacccggagacgggcggaccgtcatggaaggcgtgctcggcgacatcgtaatctgtccatgggtcgcagcgcagcaggcgctcgcagccggccacagtaccatggaggaaatgatgctgctgaccatccacggtattctgcacctgctcggatacgatcatgtgaccccggagcaggaacgtcagatgttcggtctgcaacggcaactgctactgacgtttttcgcactccggcagggtgtcggcgcacaggcgacattacccgccggcgcatcggatgcgcttgccgaatgggaccgtgagcatggttccggccggcagatcgccaaatagcccatgcaggcatagtgggaggaacgacaaccatggaaggcatgaccatcgtcatcatcgccgtgctgattatcgtggcgttgctgctggtatggctgtcgctgtcgatggcggcaaccgaaggtgcggtggcgcgtgtaaccagggccagcctgaacaatctcattcttgagattcagacggactccgaaatctcgccattcatcaggggcaagaagatcaagcgcatccataaggtgcagcgactggtttccgatcgatacgcgacggcaggatcctgcgcgttctttcgtatcacctgcaatgtgctcgacggcgtgctagtggcatgcatcgcggtgatgttcgatgcaccgttgtggtccgagctgctatgcggattcgtcttcgcgttgatcgtggccgtgatttcgttgctggtgcgtccgcgtagcgcgggagcgtccaagcctgtggacatcatgctgcaacatgccaatgcggtgtcggtcgcgaccatgctgacgccattcgccaaaatcggagggcagcaggattccaagcgccgtaatggcgacctttccgacgatgaggagttggagaagatccagctcgaacagggaagtgcaaccatcgaccgcttggtcgaagcgaacgatttcgatccagaggtttccgaaatgctacgcaatgtgctcatgctctcggaaaccctgacccgcgaaatcatggtgcctcgcaccgatatgatctgcgtcgaacgagacgagacattggagaacatgctgaaactctgttcccgttccggtttctcccgggtgccggtcatcggcgacgacgtcgatgacctggtaggcatcgcctatctcaaggatgcggtacgggcgaccgccttcaatccggctgcgctgtcccgcgatgtggaatcgatcgtacgcgatccgatgctggtgccggaatccaagccggtcgacgatttattccatcagatgcaacgcacgcgtcagcatgtggcggtcgtggtggacgagtatggcggcatcgccggtttggtcaccatcgaagacaccatcgaacagatcgtgggcgagcttgaagacgaacatgaccgcacccaacatgccgaacccgaaagactgggggagaagaagtggagcatgccggcccgtaccaccatcgccgatcttgaggagatcttcgaaatcgacatcgatgaggatgatgtcgacacggtgtacggcctgttgaccaagctgttgggacgcgtgccgatcgtcggcgcatccgcggtgacccgtggcctgagactgactgcggtggactccgccggacggcgtaagaaggtgtccaccattgtggtggaaccggcgcacgtcgagggcgtggacgaaactgaacaccagaacgaagaaccgaacgacgctgccgatcaggcgtcgagtaacgacaaggattccaaggacaagcatgactgacccacacgatatgaccgactccacctccacctccgcggattccgcagcgcctgtcccatatcgttccggattcgtcgccgtggtcggacgtccgaatgtgggcaagtccacgcttatcaatgcattgatcggcacgcagatcgccatcgcgtcatcccgtccggaaaccacgcgtaaggccatccgaggcattctcaccaccgataacgcgcagatcgtgctggtggatacccctggcattcatcgaccccgtacgctgctcggccagcgtctcaatgacgtggtcgacgagtccctggcagatgtggatgccatcgcgttcctgctgccgggagatcaggagatcggccccggcgataagcgtatcctcagccgactgcgttccgaattcgcggcgaagcgcgatgacggcacgttcaaatggaaggtgcctttgatcgccatcgtcaccaaaatcgacgagctttctcgtgaagggctaatcaacaaactcatcgaaatcaacgaattcgctgatttcaccgatatcgtgccggtcagtgcgctgaaacacgacaatctgtccgaagtcaggaacgtgcttgtggagaacatgccggaaggcccacagatgtaccccgccgagcagattaccgaggaacgtccggaagacaccatcgccgaactggtgcgtggcgcgttccttgaggagttggacgacgagttgccgcattcgctggccgtggtcgtggattccatcgagtatccggaagacaacgagagtggcatggcctatgacggcaaggcgcaagtgatcgtatccatctatgtggagcgtgattcgcagaagccgatcattatcggcaagggtgcggagcatctggtacgtgtcaagaagaagctgcgcactccggtcaaccgcatcgtcggccagaaggcccggcttgacctgcatgtcaaggtcgccaagggctggcagtcggatcctaagcagctcgagaagctgggcttctgatctgcttcgtggcgctcggataacgtgtcgcctactactgaagaatgtcgtttcgcgcgggaaacatggtggtggtccgcacgaaacgacattttgcgatacgacaatgtcgttccgccgcgattcttttcatgtttttcgcggcggaacgacattgcagggtgatcgtcatgtcgcgaaggcctccatcatgacgatcacaacatgatacgaagtgatcacttcttcttggtgtacatctgcgtattgagcagggtggaatagcgcttgatcaccttcggacggatcaccttcatggaagcggtcatcagaccgttttcctgagtgaactcctccggtaggatgatgaatttacgcacggattcggcgcgggatacgccctcgttggcctggtcgacccacttctgcacttcagcacgtaccgccgcattgttcgcggcttcctcaagcggcatgtcgcggttgagccccttgctttccagccacggacgaagcgactcctcatccagcgtgatcagtgcggagatgaaggggcgcttgtcgccaagcaccaacgcctgcgacacgaactcacaacgctgaatgacctcttcgatcgggccgggggagacgttcttaccgcctgcagtgatgatcaggtccttcttacgaccgatgatatacaggaaaccatcatcatcgatgcggccaaggtcgcccgtggcgtaccagccgtcttcgacgaaggaatcctcggaagcctcctcgttcttgtggtagcgcgggaacacggcggtgcctctgacctgaatctcgtcgtcttcggcgatacgcaactcaaagccggggaacgcgatgccgacggagccttgatggtacggtacacccaccggattgaaagcgcatggcgcggtggtctcggtcagaccataaccctcatataccggcacgtttgcgccgcggaagaacgccatcagttccggatcaagcggagcgccgccggctacgatccacttggcgcggccgccgagcacttcgcgcagcgaggcatagaccatcgggtcgaacgccgctcgacgtgccttggccaacgctccggccttgcccttggcgctgacttccttcatatagttctgcgcggcgaccacggccgcggcgaacgccacgcccttggcaccgtgaccggctttctgggatgcggcgttatacaccttctccaatacacgcggaaccacgatcatcacggtcggcttggccacctgcaggtcggtgatcagcgtcttgatgccctgcgcgatgtagatgtgcagctggctggccacgcaaatgtagttgatggcacgtgcgaaggagtgcgcctgcggcaggaacagcaacacggtgtgcctgctgttgcgcaagaggtcgggcatgtattccggcaggttcaatgcggtggtgcagtagtgctcgtgcgtcatctccacgcccttgggggccgccgtggaaccggaagtatatacgatggaacacagatcggtcttgtgaacggaatcaatgcgttcgtcaagttcctcgtcgcttacgacggaaccgtatgccttgatctcatccaggccaccgttttcgaaacatacgatatgctccagcgtcgggcactcatcttccgcaccgtcggccttgtcgcgcatgtccttggtctcgacaaccagcagacgggcatcggaattgtttacgatgttacgaatttgctcggcggaatcggtatcgtagatggtcgccagcacgccgccgcaggccatgaccgccgcgtcgaagatatcccactgatatgaggtgcggcacatgaacgccacaccgtcgcctttccgcaggccgtagtgcagcagaccctttgcggtttcgcggatttcggcaaggacctcgttgccggtcttggtgatccactcgccgttctccttataggtatagagaggctcgtcacccatgcgttcggcgcgatccgcgtagatgtcgtagatggacatgccatcatccaacggcgggttgccttccgttttcgtggtcagaaggcccgtttcgggatcaaggaaggtcgttgacaggaaattctgcccccattgcgcggtatggggcagatcgatatggtcgtcggtcgagacgagggtgtcgggatcgttgtaatcgggggtgttgccggagtcgtcgctgaccggatggacgaaatcacctcccagacgcaacgccttctgcgtgagattggcggcttgcttgcttaacgaggtgatgacagacacgtaacgctccttggccctacttacaatatatgacttggtatctgtgtaggaatgataatccctcaaccgcgacacgtcaccttacggtagcgtaaggaagtgttatgattgcgccgttttgggccatattcgacagatgcctcatattcgacagatgaaatttcgctccgggataggtgtgacctacgttacactgttgcgctgtatctgttcaatagatttctttaacgaggaagaaagggcacctatggctgaaacaccagaagccaccgtggccttcggagtgctcaacgagacctccgaacacgagtcccgtgttgctctgacaccggatatcgtaacaagattgcgtaaggcaggcgttacatgcctgatcgaatccggtgcgggagccgcatcgcattacgttgatgcggattatgtcaaggccggggcacaggtcgtctccgccgccgacgtgattgcacgcgccgatgtgctcggttttgtcgatcgcccaagcaatgagctgctgagccgcgtgaagaggggcacgtgggtcatcggcatgctcggatcgttcaccgacgccgattacgtggccgcacttgacaacgccggcctggtcggcgtcgccatggaaaagctgccgcgtcagctgagttcggctcagtccatggacgagatgacctcgcagaactccgtgatgggctacaaggccgccatcgtcgccgccgacgcgtacggctccttcctgccgatgatgaccaccgccgccggcaccatacgaccggccaaggtactcgtcctgggtgccggcatcgccggactgcaggccattggcaccgccaagcgtcttggcgcggtcgtgaccgcgtatgacgtccgtccggcttccaagggtgaagtcgaatcgctgggcgctaaattcctggatcttggtcttgatttctccaaggggcagggcgaaggcggttacgcccgtgcgctgagcgccgaggagcaggctcagcagcaggccgccgtcgaccagaaggccgccggattcgatatcgtcatcaccacggccaaggttccgggacgtaagcctccggtcctgctgacccgcgccggtgtggcgggtctgcaccgcggtgccgtgatcgtcgattgtgccgccagcgatctgggcggcaatgtcgagggttcggccgtcggcacccaggtgaccgaaggcggcgtgaccatcatcggtgcgccatatctggcaagtggcgtggccaccaccgcgtccaacctgctgagccgcaatgtggccgacgtgctcgcgcacttcgtacgtgatggcaggctcgtcatcgatctcaatgaggaacttgacaatgccatggtcgtcgccggccgcggcgaagaagccaagaaggaagaagagtaaggaagaacgatggatatcgtcgttgcaatcacgctgttcgtcctcgcgctgctcatcggcgtagaggtcatcggcaaggtacctgctaccttgcacaccccgctcatgtcgggcgccaactccatccatggcattgtcattgccggcgtcgtcatcgtcgccgcgcatgccaccagtccgctcgcctgggtattcatcttcctggccgccgtgctgggcaccatgaacgtcgtaggcggttacgtggtcaccgaccgcatgctggagatgttcaagtccgataagggcaagaagaaggaagaggaggccaaataaatgggtactctggccgaaatgctgagcactccgctcggtgtcgtcgaatggttcgtttacctgctggccgccgtgatgtttgtcatcggtctgcatctgatgaattccccgaagaccgctcgcaagggcaacatggtctccgcgatcggcatggccatggctgtcgtcatggcgttcatcgtgctgttcgcgggtgaggtctccaacggattcaagcactccgtggccgtagtcgtgctgatcataggcattgtcatcggtgccgtcgctggcgtggtctccgcaaagaaagtgcagatgaccgacatgccgcagctggtctccgtgttcaataccgtaggcggtggcgccgcggcgctcgtggcgttgaacgacatcctgacctccgatggcgctccgtccctcgtggtgctgatcaccgcaggtctgggcatcgtcatcggttccgtcacgttctccggctctcttatcgcagccggcaagctgcagggcatcaagttcatcaagaagctcaccctgccgggcaagagcgtctggaacgtcgtgttcatcatcctgaccgtcgcctccttcgtaatgctgtgcgtgcagccggaacagcgtctgctgtggtcgattctcgccaccgtgttcgctctgtgctacggcctcgtcttcgtcatcccgatcggtggcgccgatatgccggtcgtcatctccgtgctcaatgcatgcaccggtaccgcagtggccatgtccggccttgccatcaacaacatcgccctgatcgtggccggcgccctcgtcggcgcggccggcgtgaccttgtccatcgccatgtccaaggccatgaaccgtccgttgctgtccgtgctggccggcggtttcggcggatccagctccgtcgccgcaggcgaaggtccggagggcaccatgaaggagacttccgccgatgatcttgccgtgcagctggtctatgccgagaaggtcatcttcgtgccgggcttcggtctggcccaggctcaggcgcagcgcgagctcgccgatcttggcgtcctcctcaaggaccatggcgtcgaggtctcctatgccatccacccggtggctggccgtatgcccggtcatatgaacgtgctgctcgccgaagccaacgtgccgtacgaggagctcgtcgatctggatgacatcaatccgcagttcccgcaggccaatgtcgcccttgtcgtcggcgccaacgatgtgaccaatccggccgcccgcaagccgggcaccccggtctccggcatgccgatcctcgacgtggacaaggcgcagaacgtggtggtcatgaagcgtggccgtggcaccggttacgccggcattcagaacgagttgtatttcgaagacaacacgcagatgctgttcggcgacgccaaggcgagcctgcaggccgtcatcgctgccgtcaaggaactgatcaactagcatcataacgaagcgttatccgcttggggatgcatatgccgattatgcaaggtcctccccctagagggaggaccttgttgtatctgggggctatgactcgagctcgtcgaacatcggacgcgccattgcggcgaacggcagaatcgccagtgacgaacccaagaggatcagccagactggcaggcatccgtgcagccagccgtatgccatctgtccaagtggttgggagcatgtggccacggaggtgaccaaggccatcactttgccggtcatggattccggggtcttgaattggatggtcggaaacgtgatgaggttcaggaaatcaacggcgaccataccaatcgccaaacagccggtgagtaccagcagtcgcgtccatgcatcgaccggcatcatgaacgagatggccggtggcaggatcagaagaccttcaatgcatagcgaaagagaggcatgccggggccgtaggcgcgttgcgcataccccggcgacgaacgtgccgatgaggcccgcaatgccgacgatgccgtcgcaggtgccgtagacggcagcgtcgaaaccgagcgtgttccgtacgatgaacgggaaactcaccgaactgaaaccgaccagaatgaaattcagccacgcacacagcacaatcagtctcagtagtgccggttgctcgcgaatcaggaacaggaaggcgattctcaggtcgccgataggcgaaaacggcttttccccgtcagactcggcacgtggggattcgagatggatgcggcattcgacgagggccgccactgcgaagcagagcgcggtaatggtcatcatgagacggatgccgaagcatgcatacaagataccgcctatgaagctgggaatcagattgctgagctgctgcacctgattgatgacggccatgccttgccgcaaggtccctgcgccataacgtttgaacatctgagggagcgccgcctgtacggtcggcgtctccaaagcgtccagaacggccaaggtgatctgcacgcccgcaatgacggtgatgctgaagcctacccgggtgatccagatcagcgagagaacggtgacgataccggataatacatccagccccaccatcatggtgcgtcggttgatgcgatcggccagtacgccgccaaaagggccgatgatgatcgtcgggatgacggaaaccgcaagtaccgtcgcgaaggccgtcggagaaccggtcgcatccagcacccacatcgacatggcgaatcgtagcatggtgttgccgaatagcgagatgccttgacctgcgaccaatgcaatgaacgtagaggtaagtagaggggatcgggtttctctgaacatggaggacctttctggtgaggatgtgattgataccgaccgacggtatgtatcaatgagaaggcgaaacgcattgcgtcgaaggataggctgagtggcgtttgcggcgactatggttcggcgatgtgctccggttttgcgttgagcatggcgatccctttcgccagggcgtcgatttcgggggaatcgggatcgaacagcggcagtccgatcgcggtgagcatggtcaggaggcatcggatgcggtgtttcaattcgtccgtagtggctggatagaacatcggtgcgagccaatagttggacagcaacgccagtaattcggccgcctctcttggatactgcgtggtgatggaaccgtccgtgatgccatcttcgatgcattgacggaacatgtcggcattcgtggttcgccagtacttgaggttttcggacagcatcttcgggtcgttaagcaggggaaacgcatctcgcatgagcagcatgtgctcctggtcggtggcgttggcaagcagccagtgctgaatcttctgcagtccgttcagggaatcgtcgtcaagcggtagggtggcgttgacccgtgcggtatcgacttcggtaagtgcgtagagaatggcggccttactggggaagtggtggtagatggcgcccttgctcaggtcgccgagttcgttgatgatgtcttggatggaggtgcgctcgtagccctgcctggcgaacagcgttcgtgcggcgtcaaggatgcgctgacgtgttacttcggggtgtgcgttgcgtgccatctgccacctgccacatgattgatcggtgatgttggcacaattatacataccagcggtcggtattgatgacgaaggcattgtccgaggtgtggaagaatgggacacgcaaaattgtaacgctacaattgtagcgctacaattttatggtgacaatgaagtgcgtgcgactggtaaggagcaacatcatgacacgcgaaaacaccggagttactttcaccatcgacgatgacgcattgaactggaccggcgacggcgaatatcttcgtatcgaaccgtggggaacgaacagcgtgcgcgtgcgttccaggctcatgcagcctgtcatcgatgccgattgggcgttgctggaagcgaaggccgacccgcaagaagtgaagatcgccatcgatggcaatcgagcggaattgacgaacggactcataacggtacgggccgaacaatatgaacagtctgcggatgtcagcatctgccgattagcgttcctcaacaccgaaaccggtgagagtctgctacgcgaatgcactgatggcggtgcattgcgtctgcgtgcacgcgcgcacaatccgcgtatggacggggcggaatcgcccaccgtcatgttcgaagcgaacgcgggtgaacatatctacggcatgggcgaataccagcagccggtcatggacctcaaaggctccactttggaactggcgcatcgcaactcccaagtgtccatcccgtttatgatttccagcaaagggtacggattcctgtggcacaatccggcggtcggttccgtgaccttcggcaacaaccgcaccgaatggaaggcgggagtcgcggaccagatcgactattggatcactgtcggcaccaatgcgcagattgaaaaccagtatgccgacgccaccgggcatgctcctgtcatgcccgaatggggtctcggtttctggcaatgcaaattgcgttactggaatcaggaggaactgctgaacgtggcgcgtaccttcaggaagaagcgcattccgattgatctgatcgtcatcgacttcttccattggccgcttatgggcgacttccgcttcgacgaggaattctggcccgatccgaaggccatggccgacgagctacacgaaatgggcatcagactcatggtctccatctggccgcagatcgacctgcaatccgagaactacgacgagatgcgacaccacaactacctcgccaaaacccgccaaggcaaagacgtgggcatgtggtggccgcgtgataaccagttcttcgacgccaccaatccggcggcacgtgacttcgtatgggaattgtgccgtaagcactataccgatctcggcgtcgacgccttctggcttgacgaggccgaaccggagtggggcggtgactatgattacgcgcactacctatatcacatcggaccggtgggcaaggtcggcaacgtgtatccgcaactgtacaacaagaccttctacgacggacagcgttccatcggccgcgagggcgacatcgtgaacctcacgcgtgccggatgggcgggctcgcagcgttacggatcactcatctggtcgggtgacgttcactccaccttcgaggacctgaaggcgcagatcacctgtgcgatccacatgggcgcggccggcattccatggttcaccaccgacatgggcggcttcaactacggcggtctggacgacgaggaattcaaggagctgtacgcacgctggtgcgaattctcctgtttctcgccagtcatgcgaaaccacggcaatcgcgtgccctacaccaaaatcgaaggcaagccgaccgtcgaccgtatcggcaatcccatcgaccacatcaccaccggtgccgataacgaaccgtggagctatggcgaagacatcgaaaggctgatggtcaagtacatcaacctgcgcgaggccatgcgtccctacacgcgccagttgtttgcggcggcgcatgagagcggccagccgcttgtgcgtggtctgttcttcgattttccaggtgacgacgaggccgcaaacatcgccgacgaatacctgttcgggccggatctcctgatagcgcccgtcaccgaatccggtgtgcgctcgcgtaaagtgtatttgccgggtggaccggaaacgacttggatgaacctgcacgacggcaacagccacgaaggtgggcggaccgtcaccgtcgaagcgccgctcgatgtgattccggtattcgcgcgcaacggcgccgatcatgggctgaacggtatgatctgaccatgactactttggatgatgtggcccgccttgccggggtctcccgcatgacggcctccaacgcgatgcgcggcaaggcgattgtcaaacctgaaaccgcggcacgcgtgcgggcggccgcggcgcaactcggctaccgaccgaatctggcggcacgacaactgagttccggcaaaagccacatcatcggcgtcaccatctccgatttcgatctgatctttccggccgagctggccgcatgcgtctccgacatcgcgcagcgtcatgactatcagaccgtactgcagcaaacccgcttctccagcgacttcgaaaaacgtatgctatccagtgcggccatgcaggtgtgtgacggtaccatcatctgctggccgagtggcacggatgcgccgatcgtcgaattcggcaagactcatccgctggtggtcatcgacggattcggacttcggggaagcgttgactgtgtgttcacgccatgcttcgaaggatccgcggcagccatccggcatctgcatgcgcatgggcgctcgcggatccttcttctcggcttgtggcccaacgggctcgagcggcttgagacggcgccgaactccgcggcgttgcgattgcagggctcaatcgaggcgctggacgaactctcgctggactgtaatcttgcgaagaatgtgattccatgtgcatggaaccggcaagccggatacgaaaccatgcttcgcgtactcggtgagcgcaatgacttcgacgcggtgttctgcgccacggatccaatcgccatcggtgccatgcgcgcacttgtcgaatgcggcctcagcgtgccggacgatgtcgccgtcatcggcttcgatggtctggaggatggcgcctacactaaccccggattgaccagtgtgtccgtcagcccgcaggatatggcggcggcaagtctggatatgttgttcggcaggatcgagtccgattcggaagtgattatcgagccgcgatcggtgacggtcgattttcacatcatcgaacgaggcagtgcggagtagatgcggaaatcagccgcgtcgtagcgatttccgcatgctgtgccgctgagaatatgtgtcacatagtgggcatgcaggggcgcccgaattgactgcatgactgttgaaggggttagtctgactgctggaaaccatgacggtcaagaggggtatatggagaagaatctgaccagcggcagcgtgttcaaaaccatcgtcacgttcgccttgccgtacctgctgtcgtattttctgcagacgttgtacggcatggcggacctgttcattgcgggacagttcatcggcgtggatggcatcaccgccgttgcgaatggcagtcaggtgctctacatgctcaccgtcgtcatcgtcgggctcgccatgggcgccaccgtgaccatcggtcggacggtaggtgcgaaccgacttgacgatgccgccgaggccatcggcaacaccatcacgttatttgccggcgtcgcgcttgtgctcaccgccatgctgctgctcaacgtgcagggcatagtcacgcttatcggcactcccgccgaagcggtctgcggcaccacgcaatacctggcaatctgcttcatcggcattccgttcatcgtcgcctacaacatcatcagttcgattttccgtggtctgggcgactcgaaaagccccatgtacttcatcgcggtggcctgcgtctgcaacatcgcgcttgactatctgttcatgggccatttccggcttggaccgtccggtgcggcgctcggcaccacactcgcgcagaccatcagcgtgatcgtggcgttcgccgccatccggcacaagcgaacgggcatacgcctgcatgcggcgaatctgcgtccgcggcgcgatgtgcttggcggcattctcaaaatcggcgtgccgaccgcggtgcaggacggctgcattcaggtcgcgttcatcatcatcaccgtcatcgccaattatcgcggtctcaatgatgccgcggccgtcggcgtggtcgaaaaggtgatcagcatgctgttcctcgtaccatcctccatgcttgccaccgtttcggcgatatccgcgcagaacatcggcgcaggcaaaccggaacgtgcaatacgaacgctcaaatacgccacggcgatcaccgtggcgtatggcatcgccatctccgtcgtcgtggaattgaccgcaagcttcatcattggtctgttcaccgccgatgccaccgtgatcgtgctgggcgtccagtacattcgcagctacatcgtcgacgcgatcttcgccggcgtgcatttctgtttctccggttttttcgccgcctgcggacgttcgtatatcggattcatccacaacatcatcgccatcacgttggtgcgcgtgcccggttcatacctagcgtcgaagatgttcccgcacaccttgttcccgatgggtatcgcagcgccggccggctcgctcctgtccgtgttcatctgcctcggcttctacgcatggctcaggcgccgaagcgtgcttgaggcgaaataaaggcccggaaaacgaagacgggtctacctgcgcttcggtgcgagggtgccggccaaggcgcgctcgccggggcgggccagagggcccaccaattcgtgtgcggtatatggttcctcgatgtagtcgatgtcctcggcggtgagttgcaggtcaagtgcggcgatggcgtcatccacgcgttccggtttcgagcagccgacaatcggtgcggtcacgcctttgacccaatgccaggctagggcgacgcgggccatcggcacgccgatgcgctcggcgacttcgtggacccgcctgataatcggcagatcctgctccatgccccgatcatatttgctgcgcatcgtattgtccgtgatgcttcttttggaatccgaattccatttcggtcttgccaagtggccggaagccatgggggagtatggggtcagggctacgccgtactggcggcagaccggaatcatctcgcgttcgtcctcgcggtagagcagattgtagtggcactgcatgctggtgaacttcgtccagccattcgcctccgccgtaacctgcatgttgtggaattggtaggcgtacatctcgctggcgccgagcgcacgtaccttgccggctttgacgagtgcgtccagcgcctccatggtctcctcgatgggtgtgccatagtcgaatcgatgaatgatgtacaggtccagatagtcggtgccaagccgcttgagggtgccgtcgatttcatgattgatggcctcttgcgatagatgcccttcgttgaaatacactttgctggccaaaaccactctgtcgcgactgatgcccagacgtttgagcgcacggccgatgtacgtttcggaggtgccgaacgcatagcagttggcggtgtcgatgaaattgacgccgctgtcgatggcatggccgatgacgcgttcggtggtatcctggtcgatggtccactggtggaaatccggggatgcctcgccgaagctcataccgccgaggcagaccttggagacctgaatgccggaccatcccagaggcgcgtatcgcatgtctaccatatcgtgctcctttgcttatgatcgaaacggtatgattcgaagctatcatgttcgaccggaggaaaccaataccctgcttatcatcggtttccatgcaaaaaaactatggaagaacatgtcggacactcattggacattctttttgcatgggcgttgaatacggggtatgaacaatccaagtgcatttccgatgggcgatccgaatgatggtttcgcacagtatttcgttggacaaagttatctggcgccggtgcttgatgccccggaaatcgccatccacaacgtaaccttcgagcctggatgccgcaatcattggcatatccatcatggtggcgcgcaggtgctcatcgcagtaggcggacgtggctattaccagatcgacgggcaggagccgaaggggctcaaggcgggtcaggccgtgtgcattccggccgataccaagcactggcacggcgccgctccgggtgaggcgttctcgcacctcgcattcatggtgcctgccggtgacccttccgccatgagcaacgagtggctcgaaccggtcgacgccgtggcgtacgagcgtctcgactgactgttttgccgcatgttcgaccgtaatccctgacatcgtggaggtcgttcgggaaggcgtgtttcgcacaaggcgaaatcaccgtcccgaacggcctccacggatatggcggcgcatcatcttcggcgtttctcaggatggttactgagtaacattatggataaggttactcagtaactacatgggaaggggatgacatggctggcttcggaacgaatgccgaagatgcaccggtattgcgatttgccgatgtgtcgcgagtccatgaagcgggtgccagcagggtggtgtcgctggagcatgcggatctcaccttgcatgccggagaattcgttgccatcatggggccatcgggctcgggaaaatcgacgttgctcaatctcgccggcgggctcgacctgcctacggaagggcgcgtgttcgtcgacggcgtcgatctgacgaaactcgatgcggcgcagcgggccatgttgcggcggcgactgatcggctatgtctttcaggattacaatcttctgccgtcgcttagtgcagtggagaacgtgtcgtttccgcttgagctggatggatgggcgccgaggaaggctcatgatgctgcaatggaggcattgcgcgaagcgggcgttgaagatctcgccgaccgcaggccggaggatatgtcgggcggtcaggctcagcgcgtggccatcgcccgtgccttggtcggtccacggcggcttctgctggccgacgagccgaccggggctttggactcccataccggattgaagattctcgaagtgctgcgtgcacgtgccgacgccggtgccgccgtgctcatggtcacccatgagccacgctatgccgcttggtccgatcgcacggtgttcatccgagacggaagaatcgtggatgagaccggacccacggatttcgatgccatgcttgagtccgatgatgccgtggaatcggggcgatagacatggcccgtatcttcgcccttcgatccgtgctgcgacttgcctggcgtgatatgtgccgtcatcgtgctcggacgacgttctccacgctgcttatcgccttgcctatgatggcgttgatcgtcggcgccacattgatgacgggtgctccgcccatgcgggagcgggcgttgcgaagcataccggaaggcgctcaagccgtgatcactgcaaccgcggtcaagcgcgacgggaatccgttcgaacaaccccctgagggagcgtccatctggatggatgagattactcagcaaccggcgagcgaagacgagctcaaacgcattgtgccgtcctcggacaagctgctgccgtattgggattccgaacagctcatagccgccacggcaaccggcctgcagccggggcaggtcgagtcggcgaagaattcgtcgatcggcggcaccctggcacaatccggcacgggcaccgcacggctatgcgaggccggcgcggaagcgctcggtatgctgctgccgaagctgagcgaaggaacggttccgagcaatgccgatgaaatcgtcgtcaccagtggattggcttcgcggatcggagccgacatcggcgatacgattacactgatagccccgccttttcaaggatcgtatagcaccaatggccgcatagccgcagtcatacagaattcacagcgtgcctggcgcatcagtggcatcgttgccgatgacgccatctccaaagcctgggcccgggacggatggatgtccggcatggtcgcccacgacggtggtgccggagtggacagacattacctcgtggtcggcgataagccgatcacctggcggcaggtcaagaagatgaatctgcttcagacggtggcggtatcacggcatgtgcttaccgatgggtacccgaatgcttccgagcgatatccctcgcgtatcgatagccaggcgctactgcagtacgccgtgggattcatagtcgccgtggccatgggcgtcgcgctcgtgctatgtctggttacgcctgcattctcgatatcggtcgatcaatcacgtcgcacgatgggtctcgcctcagcctgcggtgccgggccacgcgatgtacggaacatgttcggactgcaaggcgtctgttcgggattcgccggtggtgtcattggcatgctggccggtatcggaggaatatatgtgatggctccctccgtcatacatgtcgacgttcatgagatcccgcaggtgattccatgggggctgttcccgctggtcgtcatgacgtccacgttgatcggagccttcgccacatggatgccggcacgccgtgcaggacgtatgaatgtggtcgatgcgctgcgggaccggcccgatgggctggaacgtgagcgttatgcaggaaaaggtgccggaaagattgcgctgatatcgggacccatgcttatgctggcggcctgcggatgcgccgtgacgagcatgcgggtgaaggtttcggatgtttcttcgccgggagtgttgccggaaggctcaggaacatccctggtgctgttggtcgccgccatcgtgctggccatgattggcctggtgcggctggtgaaaggccttatcgtcatatatggtgcggtcggtcgaagtctgcccttgtccatacgaacgggtttgcgtgattcggcggaacaccatcgcaggttcgtacctgccaccatcgcggtcgtgctgaccatggcattggcctcctatgccatggtgctgatcggctcgactctggccaacgataggagcatggaacttgtgcacggtcaatcccatgtgattctgtccgcggaggtgccggtgaacgacgataccgatcgcatggtggttgccgacggcatacgtaagctgggtgataccgcatcgttcaaagaccaccagccgatctatgccttggctcagccggatgcggaatccacgatgaacctgacgggcaaggcatacgacgacatctacgcacaataccctaccgtcaaggcgcttctcgccaccgaactgcattgcgaggtgaacgaacggcagcagtatgggcaggatatggcatccgccttcgatccgaacggtgcgccatattgcgtgaactggtccaagtcgtacgaggcggtcggatacacaggcctttccatgatcaacatggatcccagcgtgatcatcatgtctgccgatgcgatgcgcatgacgggtttcccgaatgccgagcaggccgcacgcaccttggaggaaggcggtgtggtcgtcggcaatgcggcggcattgcgagaggacaatacggtcaccctgcaggtgagccaccgcacccttgatgatgacgggaacagcggttcggaacatgtcgtaaggcaatccgtccgcaaggcgacatggatgaagggcttttacccgctggccatgagcgagcgtacggcacgtgagctcggcatcgtcaatttgcgctatgtgggtgacatcgccgcattggaccatgtgcatggatggagtgccatcgagcggttgcgcaaggcgacgagcggcatgccattggtgaacatgaccagtcaacggtaccaatacgaatgggcgacggatgccgatggtgcgaaaatcacgcttgcccccgtcgtggcgcttggcctgcttgccctgacggctacggtggtgtcgctgctattgtcccgaacccagaccatccgtgacatgaccaccatgcatgcggtgggagcctcaccgggatttttacgtcgcctcggtcttgtgcaggcgatgacgatactgttgccgggggtgccgttaggcatgatcgccggtctcgcccttggctgctaccacattgcgtggtgccggcgtatcggcatcgacggtgcatggctggaaaccgtaccttgctggcaactgcagattgcgcttgccataacggtcattgcggcgggatcgctatcggcctggctggtaaccagtcctccccgcaatctgacgcgacgtaccatcgattaaagggaacaggaggacgatatggccatacgagaggcattgctggcgttgcttgaacagagcccatccaccgcatatcaactcaagcagggattcgaacgcgccacatcaaggatctggccattgaacatggggcagatctcgaccaccctgcaacggttgcatcgggatgggttgatcgaggaggagcctaaacgacacgacgaggccgtggtgtggaaactgacggatgatggacgtcgggaagccgagcaatggtggttgacaccggtcacgctggaacagcgtggcagggatgagttggtcatgaaactcgcctttgccgcggtcacgccgggggtcgatcttgatcggttgatcgaacggcaacgtatctgcctgcagcggctgttgcatgacgtcacccgcgccaaacgactcaccgatgccgataacattgcggcgcgcctagtgctggatcatcatatcttcgccaccgaagctgaattgcactggctggatacgttcgacgaaaccatgctgcgcaatgccgcgcgccgcaaccagaccagtgtcgaaaatgccggtgacaagcaggaggcaccgtcccgtttccctgtgcctgacctgcatgttcacaagggctgaatcccggtcgtggaagtgactatactggcgggcatgtcacgacaacacatcattcgatgggatctgatgggcgtggtgttcgtcggcggatgcatcggcaccggcctgcggtatgcatgctcgttcatcgccgattatggggcgtttcacttcggcacgttcacggcgaacatgatcgcctgcttcgcctatgcgacgttatccgcatggttgggcggttccgcgcgtcttacgggcaatgccaaggaatacgtgaaccgtggtttcggcatgggcctgtgcggcgggctctccaccatgtcgacgctcgccttggaacagtttacgttgctgcatgggggagatactcctggcgccgccatctactgcgtcgtgacgttccttgccggattcgcgttcgcctatgcgggctcccgtaccggttcgcatatcgcgaatacgaggaagggggcatgaagtgaatgcattcctgccgattctggtgtgcctgtgtggtggactcggcgcttccgcgcgttatgtctgtgattcgtatatcaaggcgtgctggcatagggcattcccgatgtccacattcgtcatcaatgtgatagccggttttctggcgggaatcgtcgccggcctgtatacgcgttccgtcgtgcctcaggctgcccgtctgctgctcgccaccggtttcctcggtggattctcgaccttctcaaccatgatgaacgaaaccgtcaccttgctgcgcggcggtaggatagcggcgttcgtcggatacttcgtggcgtccgtcatcgttccggtcattgccgtcgcctgcggctatatgatcgtcgaatgatgcggcgggaggggcggatgcatatcgtagagtgaatggctgaccctacatcatgtccatcagcatgaaggcgagcaacagctgcagcctgctgtcaagcttggacaggtccatgcacaggatttccgcggccttggagattttgtaattcaccgtgttgcgatgtacgaacagctcgtcggcggtctctttcacgctgccgttgtgattgagatagcaccgcagtacgtccagcaggtcggagtcggattccttgtcgtattcgatcagcggccccagaatctgcgtgtggtattcccgtgagatttccggatcctcgatgccgagcaatacccggtatgcgccgaggtcgtcgaagaaattgatgcggtcctccagctttttccgcgattgcagcttcaggatggaggccgcctgacggtggcttttgctgacgcagcgtatgcttttggtaagttttcccacgccgatggaggcggtctcctgccggcgcagcgcgtgctcgacgatcgtcagtatgccgcgcccccagttacgcagctgttgcggttcgtcgcagtgcatgacgacgataatctgtttccaggcgctgaatacggtgctgaaacgtacgtccctgtgcaggtatctcctgatttccgcggcgatgaggttcagtcgcacatacgggtcgcccgcatagttctcgatctgcacgattgccacggcataacgccattcgatttcgaaatggaattccgaaagcgtcgccgtatacagttcctgctggtcggggaaggagatggcgttctggaacgcggcgctcaccatgcgttccttcgtctcctcctcgatgaggcggcggcacagcgggcgggcgatgttttcgaacggcgcgcttttcggaatggtgaacagtgggaagccgtgctcttcgcaaaagagcaccacatcctcgggcggctccataaagaaatgcccgatgtcgagggcgatgcccgccgcgcgatgctcgtacagggacttgacgtgtttaagcagagccccatcctcctgcaaggcgatgccggtgacgaggatcagttcgtcgccggccaggtaatcgatcatctgagtggactccagcacatgtacccaagtgacgtggtgaccgagtccgtcttcgccggcggccggatgaagagggacgtccggacacccttcaatcagctcccgtaattccaaagtcatgtgtaatctccgcgaaatatagcttttacagtgtgtttcgagatgtcgtggacatcgcgttcgcatggctgcggccaagcaccatcatatcggccccatattaccgttctttaccgatcgttcatccgttcttcagcgtcgtacgtatgttacgacaaatcgattgtgctcaagcacaaccaaatttgggcttggatgactggagaaacggtttcgagaggaaacataatgagtcccagttccggccggaagagacgaccgggcaggccgtttcaagacctttcgtcacaagaaacaaggagagtcgcatcatgaggctgcaggacaccggattgacattcgaagacatcaagagcaaggtcgacacctatatgatcgaaacctacgagcgtttcgatttccttgcagaccacgccaagggcgtctatatgtatgacgagaacgacaccccgtatctcgacttctacgcgggcatcgccgtcaactccgtcggcaactgcaatgaaaaggtcgtcaaggcggtgcaggaccaagccgccaccctgatgcagaccttcaactatccgtacaccgtgccgcaggtgctgctcgccgaaaagatctgcaaggccatcggcatggacaagatcttctaccagaactccggcaccgaatccaatgaggccatgatcaagatggcacgtaagtacggcgtcgagaagtacggcccgaacaagtatcatatcgtcaccgcccgtgaatccttccacggccgcaccttcggcgccatgtccgcgaccggtcagccggacaacgcctgtcaggtcggtttcggcccgatgaccgacggcttctcctatgctccgttcaacgaccttgaagccttcaaggcggcctgtaacgagaacactatcggcatcatggtcgagccggtccaaggcgaaggcggcgtgcatccggcgaccaaggaattcctacagggactgcgcgagttctgcgatgagaagggcattctgctgctgcttgatgaggtgcagtccggttggggccgtaccggtgcgctcatgtcgtacatgaactatggcatcaagccggacatcgtctccatggccaaggccatgggcggcggcatgccgatcggtgcgatctgcgccacgcaagaggtggccaaggccttcaccatgggctctcacggcaccactttcggcggtcacccggtctgctgcgcagcctcgcttgccgcagtcaccgaaatcatcgatcgtgacctgccgggcaacgccaagaaggtcggtgcctacttcatcgataagctgtccaagctgccgcacgtcaaggaggcccgtggccagggtctgtttgtcggcgtcgaattcgacggcaccatcaatgccgtggacgtcaagcatggctgtctcgaccgcaaactgctcatcacggccatcggcaaggacgtcatccgcatggtcccgccgctgatcatcaccgaggaggatgccgacaaggcgacctccatcatcgcggaaaccatcgaggccctgtctgagtgatcggcccgtcggttcccgaatcgtgaacatacctatgaaaggaggagcagtatgaagcacatggtcatcaccatcggctgcgaatacggcgccggtggtccggaaatcggaaagatgctcgccaaggcgctcggcatcgaatattacgaccgtgacctcgtcgataagatcatcaacgatctggacgtggacaaggagctcgtggaaaaggccgataagggaacgaacgtcccctataccttcgagacgacactcggtccgcgttacgcgaacctgacgaacaaggtcatctccctgcaataccaagccatgcacaagatggccgatcaatcatcctgcgtcatcatcggccgcagcgccaactatctgctgcaggacagggacgatctgatcaacatcttcatctatgcgccggaggaggaccgcatccgcgcgatcatggaaaaccaatccgtgagcgagaagaaggcgcgcgagatcgtcagctacaacgacgagaagaaccgcagcaggcatcagtacatcaccggcaccaatcgtggtgaccggagccagcgcgacctgctgatcaacagcagcctgctcggctgggagaagacctgccagtatctgctcatgctcgtcgaaatgctgaacgaataaccggacacaggggccgtaactcgaggggagcgcggcctctttccgcttttgtgaatcgccatcgcagagcttacgtgaggaaggaactttcgatggaaacgccaactaaaaaaacttcggaattcaaaaagtcattcagttcccttgacatcctgatgatcgccttcggcgcgatgatcggctggggatgggtggtctccaccggcgactggatcggaacggcaggcgtgatcggcgccatgctcggcttcatcctcggcggcgtgatgatctttttcatcggcatgacctatgccgagctgacgccggcaatgcccgaatgcggcggtgagcatgtgttcagcatgcgtgccatggggccgatcggctcattcgtctgtacctgggccatcgtactcggttacgtgagcgtcgtctgcttcgaggcgtgcgccttgccgaccatcatcacgtatgtgtggccggacttcctgcaggggtacctatactccgtcgcaggattcgacatctacgccacatggctgggcaccgccgtgctgttcgccgtcttcatcaccgtcatcaatatcatgggtgcgcagatcgcggccaagctgcagaacattctgaccctgtgcatcggcgccgccggcatcctgctgatcgcggcatccgtgatcaccggagatgcctccaacctgcaggaccagatgttcgaaggctcgggcatgggcggcatgatggccaccatcgtcaaggtcgccgccgtcagcccgttcttcttcatcggctttgacgtgattccacaggccgccgaagagatcaacgtgccgcttaagaagatcggcaagatcctcatcctctccatcgttttgggcatcagcttctatgcgttggtgattttctccgtgggctacgtgatgaccggcgatcagatcgccgcctccgccaatggcaccggcttggtcaccgccgacgccatggccgcggccttccacagcaacatcatggcgaaggtgctgattctcgccggcatgtgcggcatcctcaccagctggaactcgttcatgatcggcggcagccgagccatgtactccatggccgagtcctatatgatcccgcgtttcttcaccaagctgcattccaaggccaagaccccgtacgtcgccatcatcgtcgtcggcatcctgagcgtgctcgcaccgttcgccggacgtaagatgctcgtgtgggtcgtggacgcaggcaacttcggatgcatcctcgcatactgcatggtatcgctgtccttcatcatcctgcatgtgaaggaaccggacatggtccgcccgtatcgggtgaagcattggaagctcatcggcaccatggccgtgctgatgtccggcatcatgatcatgctgtacatccttccgggcaccggtgtgaccctggctccgcaggaatggctcatggtcgccggctggtccgcgctcggcgtcgtgttcttcatcttcagcaagatggtctacaaggacaagttcggctattatgcgcagctgtacgtcagcgaactcgataacggcgacgaacaggaaaagacggtttccgaatcctccgcgatcatcaaccttgcagcgtccgaagccagcgcccccgacgagtgggcgaacggtttcggctacttcctgccgatcaatctggtgttcggcaagggcaaggtacgtgaggtcggtacgatcgcatccgcgcacggtaccaccgcaatgatcgtcaccggcggccattccgtgaagaacagcggcacctacgacaagatccgcggcctgctcgaagaagcgggcctgaccacggtgctcttcgacaaggtcactccgaacccgctgaccaccacggtcgaggagggtgcccgactcgccaaggaccggcaggtcgatgtcgtgatcggtctgggcggcggcagcaccatggatgcggccaagggcattgcgttcatggccgaaaacgagggtggcgtcagcgagtacatctatggcgagcgtacctccgacaaggccctgccgctcatcctcgtgccgaccaccttcggcaccggatccgaggccaacggcttcgcggtcatgaccaacccggacaacggcgacaagaagtcgttgcgcagcccggcgcttgtggccaccgcgtccatcgttgatcccgacctgatgcgcacgatgccgagcagcgtgatcgccgccaacggttgcgacatgctatgtcactgcatcgaggcgttcaccgccaataatgcacagccgttcaccgatgcgctcgccctgtatgcaattccgctcatcgccaacaacatcgtgagcctgtatcgaggtgagggcaccgacgaacagtgggccaaggtctgtctcgccggcaccatcggcggcatggtcatcaacaccgccggcatcactctggcgcacgccatggaacatccggtcagtggtctgaggaacgtcacccatggcaagggcctggctgccatcgagccgaccgccatcgaagcgacctatcagtacaaccgcttcaagtacggtcgtatcgcgaggattctgggcggcttcaccgccgaggattgcgcgccacgagtgaagagactgctcgcggatcttgatctcaacgtgacgctacgcgatctcggcatcgagaagaaggacattccatggttggcgcagaacgcccagaaggtctctccgggcaatcttgtgaacacgccgggctcccagctcgtcaccaccgaggaatcgttggagaagctgtacgagtcgatgctctgagtgctcagtcacatcgattcgccgatggatggccgttgggaatcccaaaggcgaatgcgatatgagggtgtgatgtcccaccgtggatagcggcgggacatcacgctttttcatgtttggaggcttttctgcataggggaaatgaccttccatgatggcatagtggaatgcgtcacgcaatgggaggaacgacatgacgtacatgcaggcgttgctggggttcgcggtgctggccggagccatggccatggtgccaggtctcgacatggtgatgaccatgaacgaggcaatccactatgggcgacgcaacggcatcatggcgggattcggcatccaatgcggcgtgctggtatgggccgtcgccgcgtcattgggcctggccgcactgatttccgcattcccgctggcctatgacatcatccgcgtgatcggaggcatgtatctgttctatctggcatggagcatgtccggcatgtccgattgggcgaagcgcaagcttggcatcgcaacgaagcaaaccgaaatgcaacctcgggaagccgccgatgactccaccgcatccacggaatccgtcgcacggtccatgatcgccccgacctccaggccaagcctgttctcttcatggtggcgcggtttcctcaccgatttcttcaacccgaaaataagcgttttctacatcgcagtcatcccgcagttcctcgtgtccggcgtcggcaatctccaaatgggtctgtcgcttggactgatccacgccatcgaaggcggtgtgattctcaccgtcgtggcctgtgcggccgccaccttctccgccaaactcaccagttcacgcggcaaaagcatcctttccatcgttaccggtggcgtcatggccctgcttggaggcgcaaccatcctcgacgtggtgcgaagccacaccgcctgacggaagatcacggcctcgcctttgattgtcaagggggtagcgtgtgataccgtgcaggttatggagattacatataccgatgagaagaagttcaccaaagagcagacgcagcggctattccgttccgtcggctgggtgtcaggggagtatccggaacgcctgtacaaggcgttgatgggctcgtccaccgtgttttcggcttgggatggtgaccgtcttgccggtttggtgcgcgtgcttgacgataccgagatggtggcctacatgcactacgtgcttgtagatccggaatatcagggtcacggcatcgccggacatctggtcggcatggtcaaagaccgataccgtgattacctgtatatcgaggtcatgccggaggagagcaagaacgcgtcgttctaccagaagcacggcttccagatcatggaggacggcgtggccatgcagatctgcaatcccggcgagaagcggtgaaacggacgaatcctacaatctgaacgttcgcctgacgaatcgttcgatcttgcgccagtacacgtccggcgccaccaccgagcccatcacatgatcggcgcctggcaccagcaacttttcacggtcgagacttgagcaggcgttgaaattcatatcgaggaaacgtggggatacgaaggtgtcggcgtctccgtggacgaacagcaccggaatcgtcgcatggcggagttgctccatactcgaggcatcgttgaagtcgtagccggccttgtacttgcagacaagtcccgccgcgtccacgcacatcgccgcgagcagctttggcagatggaacatcgcacgggacgtatcgatgaattgcagtctcaccgacgcgtagccgctgtcttcgatggcggaaaccacattacggggcaaccttgggtctccgacggtcatcatcaccgttgccgcgcccatcgaattgccatgcagcaggatacgggcttcgggatcgctttcgatgatcagatgaatccaattgagcaggtcattgcgttccagccatcccatgccggtatagcgcccctcgctcatctcgtgcgcgcgctgcgctggcaccagcaccgtgaaaccgaggcgtgcaaagcgatgcgcccatgttgccatctccgcgggctcacccgtatacccatggcagcaaatcgcgtaaagatgcggtttcgggcttatgcaatccgggtcgaacagccaaccatgcaacgtaagaccgtcgaagcttgtgatggtgaccggttgcttggtctcttgaaaccatacgccggcttcgcgtgcctcgccggtattcatcagacgttcgcgttccggatcgtccggcggggactgacggaacatggacttcttgcattgcgagtccaaagcgaacctgaacagcgaatttgcgcaaatggccagcgctcccgcagatgccacggccgcggctcccgttgcaatgcagatggtgcgggcgatatcagaatgggtgcgcctcattgctgcctcgattcgttgatttcgtgtattcgttccctgttcatacatgatgaccgatgtgttcgattgtacgtgtgttccgcacctttgcggcgttgaacacgcattgtcagaccgatgtgtatacttaaggactgttgtcttggcgagggaagcatgagcttccgtaatcgactcggcgtgtgagtgcactccttgagtgtcttcgcggctcgttgatgcgccgaaacagaagaacgaatatcaaggagatatcgattatggctaccaccattaccctcgaaggcgccgctcgtaccgagttcggcaagggcgctgcccgccgtctgcgcgtcgccaagctgattccggccaccgtgtacgccggcggtgaggctccggtcttcgtgcagctgccgatgaaggagaccaccctgtccctgcgtcacaccaacgctctgttcaccatcaagtacggcgagcagaccaagatggccatcgtcaaggacgtgcagcgcaatccggtgaagcgcatcgtcgagcatgttgatttctatgaggtcaaggccggcgagaagatcgacgtcgaggtgccggtgttcgtcgaaggcactccgaagggtgccgccgtcgcgttcgtcgacattcaggagctcaaggtccgcgccgacgtcgccaacctgcccgagaagatcgtggtcaacgtcgatggcctgaccgatggcgccaaggtcttcgccaaggacgtcgtgctgccggaaggcgtcgtgcttgacgttgaggatccggaagagtccgtcgtcaccgtcgaggtgccggaagatgccgctgaggcagccccggccgccgacgccgccgagaccgccgacgccgagtgagatagctcgtttccgcaagcgttcgattacggagtccgcgcatgtagattgcatgcgcggactcctttgtttccgctacgtttcatgccatctcatatcgcgaacgatggttatcgattgagattatggtgtgagaaagtactaaccagagccggcgccacaagcgctggcatgtcaacatccgcatgccgcgaaagcggctgatgcataagaagaagttaagaatgactgaacagaatcatcacgatccggcggagcttgacaagctcaccgagaagttcaccgtgctccctaacgacaacccggcatccgacgccaagcgcgccgagctcatcgacaagccggccttcggtcaggtgttctccgataatatggcccacatgacctggaccaagggcgaaggctggggcgatcgccgcatcgaaccgtatgcgccgctgaagatggatccgggcgcatccgtgttgcattacgctcaggaatgcttcgaaggtctcaaggcctaccgtcacgccgacggctccacttggctgttccgcccggatgcgaatgccgaacgattccagaattccgccaagcgtctgtaccttccggaactgccgattgacgatttcatcggttccgtggctgctctcgtcaagcgtgatgtgaactgggtgccgtcccgtcgtgagtacaccctgtacatgcgtccgttcatgttcgcctccgagccgttccttggcgtgcgggcaccgcatgaagtggactattgcgtgattgcttccccgtctggtccgtacttcccgggcggtgtgaagccggtcagcatctgggttgaagacaagtggttccgtaccggccctggtggcaccggcttcgccaagtgcggtggcaactatgcggcttccctgctcggtgaatacaccggcattgaccacggttgcgaacaggtctgcttcgtggacgccgccaccaagacctacctcgaggagcttggcggcatgaacatgatggtcgtgcacaaggatggccacgtggagactccgtccctgaccggcaacatcctgccgggcgtgacccgccgttccctgattcagctcatccaggacaatggccacgacgtggtcgaaaccatgatcgccttggatcagctgctcgaagacatcaagtccggcgaggtcaccgaggtgttcgcctgcggtaccgcagccatcatcaccccgattggccgtttcaagtccgagaagttcgacgtgaccgtcgcggatggcggctccggcgaattcaccgtcgccctgcgcaaccagctgctcggcattcagctcggcgagatcgaggatccgcacaactggatgtggaaggtctgctgatcttcgctaagaccgtttcctaacagcgcgtagaccgccggagggcggtatatacgtcgtacgatcgtaaacttggcctgaaggccggacgtgtcgtacgatgcatataccgccctccggctcttttatggtgatatggcacctgcgggctatggtatttttgcagttgcatgaaggaaccttgtgagggagggggagaagatatggaagtggccctggaaagcaacgggtttttcatgggcatcgaatacctggcgacgttctgctgcggtatggtcggcggacttgccgccgtgcgcaagggatatgatgtctttgcgattctcgtgactacatggctcaccgcattgggaggcggcatcattcgtgatgtgttgctcggtgcgctccctcccgcaggcgtctccgacaaggggctggtgatcaccgcgctgctggcggccgtcaccgtggccgtcgcacatccggaaatcaacaaactcagatggtccatgctgtcgttggatgcgctggcgctgggattgtacgccgttaacggtaccagtaaggccatgatgtaccacatgtccggcaccacggcgttttttctgggcatgtttaccgcattgggcggcggactgatcagggacatgctcatcaatgaagttcccatggtgattcgtgacaaacattggtatgcggtgccatccgccgtcggatgcatactcaccgtgttggtgtgcaagggtgtgaatgccggcatcatcgctttcccggcggaggtcgtgcttgatgtgctcatcgtcgtactcatggtcggtatgcgattggcgtcggtgatcttcgatattcagttgcctggcgctcttgcacggcacaatacgtatctaccgggtgaatcaaagtatctgaaacgccctgtcatccatcccgacaaagatgatgacggcaaagacgacaggcatgaatagcagaagccccgcaggagaatctgcggggcttccatataaacggtgagttacgaaaactcagagagcgttgatggccacggcgagaccggacttgcggttggcagcctggttcttgtggatcacgccggcgccagcagccttgtcgagcttctgggccgcgaccttgtaggcggcctcggcggcggccttatcgccggcggcgatggcttcgcgggtggcgcgaacggcggtcttcaggccggacttcactgccacgttacgcttgtgggccttctcgttggtgagaacgcgcttcttctgcgacttaatgtttgccactattactccaaacgacgttttctataaggacatacaaacgaaaatgataacatggcgcgcggataaatcgccagcgggcctaggagtgtcgcggcgcaccctgccgataccagcggttagaatcgtttgcgttacgtatttcaggaggaggatggcgtgggccagcagcataatcagcccggtttcaccgatcagtcgttgatccgcaatttctgcatcatcgcgcatatcgatcacggcaaatcgacggtggcggaccgcattctgcagctcagcggcatcgtaccggaacgagagatgcgtgaccgcttcctcgatcgcatggatatcgagcaggagcgtggcatcaccatcaaatcgcaggccgtgcgcgtgccgtggacctttgatggcaccgaatacacacttggcatgatcgatactccgggccacgtcgatttcacctacgaagtctcccgtgcactggccgcatgcgaaggtgccgtgctgctcgtcgacgccacgcagggcatcgaagcgcagacgctgtccaatctgtacatggccatcgaccatgatctggccatcatcccggtgctgaacaaaatcgacctgccgagcgccgaacccgacaaacacgccgaggagatcgccggcctgatcggctgcgattcgtctgacgtgctacgcgtctccggcaagaccggcgaaggcgtggccgaactgcttgatcgcatcgtcaccgatataccggctccgaaaggtgagccggatgctcccgcccgcgcgttgatcttcgattcggtctatgactcctaccgaggcatcgtcacctatatccgtatggtcgacggcgaactgcgttcccgtgagaagctgcacatgatgggtatcggcatgacccatgatccgatcgaaatcggcgtgatcagccccgacatgatgccgaccaaggcacttggagccggtgaggtcggttacgtgatcaccggagccaaggacgtcagccaatccaaggtcggtgacaccatcacctccgccgcgaatccggccactgagccgctggaaggctatcgcgacccgcagccgatggtctatgccggcctgttcccgatcgataacgcccaattcccggaattacgtgaggcgctcgacaagctcaaactcaacgacgcggccctcatctacgagccggagacttccgtggccttgggcttcggcttccggtgcggcttcctcggcctgctccacatggagattgtgaccgaacggttgagccgcgaattcaatctcgatctgatttccaccgccccaaacgtgccgtatgaggtcaccgccgaggacggtagcgtgcatcgcgtgaccaatccgagtgaattccccgacggcaagatcaagaggatcgtcgagccgatggtcgccgccgatatcatcacaccgaaggacttcatcggtgccgtgatggatctgtgtcaggatcaccgtggacagatgggcaccatggaatacatttcctccgaccgtgtggagatgcactaccgcatcccgctcgccgaaatcgtgttcgacttcttcgaccagttgaagagccgcaccaagggctatgcttcgctcgactaccacgaggacggcgagcaggccgccgatctggtgaaggtcgacattctcatccaaggcgagaaggtcgatgccttcagcgccattgtgcaccgcgataaggcatattcctacggtgtgatgatgacgaagaagctacgtgagctcattccgcgccaacagttcgagattccgatccaagcggccatcggctcacgcatcatcgcccgcgagaacattcgcgccctgcgcaaggacgtgcttgcgaagtgctatggcggcgacatctcacgcaagcgcaaactgttggagaagcaaaaggccggcaagaagcgcatgaagatgctcggacatgtcgaggtgccgcaggaggcgttcatcgccgccctgtccaccggcgatgccggcaacgaccgtgacacgaaggacaagatccgcgccgcccagaagaccgaaggctgatgttcgaagtctacattcatgtgccgttctgcatgagacgttgcggatattgcgatttcaacacgtataccgccattgacatgggtgcgggcgcgtcccggggcaactatgccaacatggtgattcgcgagatggcgatcgtgcgtgattggcaggaacgtcacggcatcgtcgaaccgccggccggcactgttttcttcggcggtggcacgccgacgattctcaaggccgcggatctggtggccatgctggatgccgtacgcgagacatggggaatcgcggacaacgccgagatcaccaccgaggcgaaccccgatacggtgaacgccgattacgtgcgcgagcttgccgacggcggcttcaatcgtatttccttcggcatgcagtccgcggttccgcacgtcctgaagacgcttgaccgcactcacacgccggagaacgtcgaggctggcatctcggccgcaaatgcggccggcatgcgttccagcgtcgacctgatctatggcgcgccgggggagagccttgatgattggcgtacctccgtgaatacggccctcgatctgggagtcaaccatatttccgcatacgcattgaccgtggctccgaacaccaccatgggtcggcgaatcgcggccggcatgttgccgaccccggacgatgatgacgaggccgccaaatacgaaatcgccgatgcgctactgtccgcggcgggacttgaatggtatgaaatcagcaactgggcacgtccaggttacgaatcacggcataacctcggctactggcgcaacgtcgactgggccggactcggacccggggcgcattcccattacgatgcacccgccctttccgagcgaggaaccgtcaggagaggccaggccgatggagaggacagcgcgacggccctgcgttcctgggacatcgcacatccgcgcctgtggggtagcgccatcagcgaaggcaggatcccgtgggctggcagcgagaacatcaccgtcgaggagaatctcgaagagaccatcatgcttggcctgcgtattcgagggggccttgacatcgcacggctcggcaatgccatcgccgaaaccacatggcgtgagctggagcatgacggcctgatcaccgttgagcatcatcatgccatccccacgcttcgcgggcgcctgctcaacgacaccatcatcgccaaactgctggaatcattggactgacgatattgcataacggcgatgcgaggtcgttttcgcatgcttggcgagaatcattacgtgggtattgacaatgccgtcgattcgttatatggacacctgaaacgctatcgacatgggggcgcggtattctaaaccacgcattaaagaaccgcaagacttttcttgcccaaaaacattgaaggtggtttcggtgactttccacgccccgttagatctgacgatccatgattcccaaggtatgtatgatcccggcgccgagcacgacgcctgcggcgtgggtatggtcaccaccctcaacaaacgaccggagcgcaagatcgttgacgacgccatcgaagtgcttgtcaacctgaaccatcgtggtgcggtcggcgccgaagagaataccggtgatggcgcgggcatcctcatgagcatgcccgacgagttcatgcgtgccaccgtaggtgtggaactgcctgaggaaggccactatgcagccggcatcgcattcctcgaccgtgacatcgccacctccggtcagcaggagcaggccatcgtccgaatcgtgcgtgaagagggtctcgaagtactcgcatggcgcatcgtgccaaccaacccggacggactcggcctgcaggctcttgccagcatgccggcgttcaagaccctcgttgtggccgatccggacaatcagctcgccggcatcgaattggatcgcaggaccttccgcatccgcaaacgcgtggagcacgaggttggcatctacttcgcgtccctgtccgcgcgcaccatcacctacaagggcatgctgaccaccatgcagctcaagcccttcttcctggatctgtccgatgagcgcatgaaggccaaaatcgccatcgtgcactcccgcttctccacgaacacgttcccgagttggccgctggcccagccatttcgtcagctggcccacaatggcgagatcaacaccatccagggcaatcgcaactggttgtccgcccgtgaaggccgactgagctccgaactgctcggtgagttcaagccgctgctgccgatcgccaccccgggctattccgattccggtaccttcgacgagtgccttgagctgctgcatctcgccggccgctccatgccccatgccatctccatgatgctgccgccggcatgggagaagaacgatcagctcgacccggatgtcaaggcgttctacgagtacaacaacacgttgatcgagccgtgggacggtccggcgcatatcatcttcaccgatggcacccaggtcggtgcgttgctcgaccgtaacggcttccgaccgggccgttggcagctcaccgatgacggctacatcgtgctcgcctccgaaaccggcgtgctgccggaggtggctgaggagcatatcgtgtccaaaggccgcctcgagccgggcaagatgttcctcgtcgacaccaatgaaggccgtatcattccggacgaggagatcaagaaggctctcgcttcccagcacccgtaccgtcaatgggtggaaggcaactccgtcgaaatgagcgaacttcccaagcgcgagcacgtcaaccactccggtcagtccgtgcaacgtcgacagcgcgccttcggctacaccgaggaggacctgaagctcctgcttgccccgatggccaacaccggcaaggaacctctgggttccatgggcaacgacgcgcctatggccgcgctgtccaaccgcagtcgcatgctgttcgactacttcacccagaagttcgcacaggtcaccaatccgccgctcgattgggaacgcgaaaagatcgtgacttgccttgaatccgccatcggtccggaaccgaacctgctggccgattccgaattgcacgccaagaagattctcattccgctcccggtgcttaactccgacgagatggcgcagctcaagcgcctcgaccgagccaaattgctcggcggctattacaagccgttcatcgtcaagggcctctatcaggtcgccggtggcggcaaggcgctgaaggaacgtctgaacgagattttcgaggaaatcgacaaagccatcgaaaacggttccaacttcctagtgctttccgaccgcgattccaactacgcatggggtccgattccgtcgttgctgctcacctcagcggtgcagcaccacctactgcgccgtcatacccgcacgcagatctccatggtggtcgaagccggcgatgtgcgcgaaatccatcatgtcgcgttgctgatcgcctatggcgcggcggcagtgaacccgtatctggccttcgaatccgttgaggatctggctcgcaagggctacctcaaggtggacgccgaaaccgccgtgaagaacctgaccggcgcgctatccaccggcgtactcaagatcatggccaagatgggcgtctccaccatcatgagctatcgtggcgcccagctgttcgaagccattggtctgaacaaggatgtcatcgacgagtatttcgccgggaccacctcccgcgtgggtggcgtcggcctcgacgaactcgccgaagaagtggccattcgccaccgcgtggcctacccgacccagtggaccgcgcgcccgcatcgtaatctgcgtaccggcggcgaatacaagtggcgccgcaccggtgaagatcacctcaatgatccggaggccatcttcctgctgcagcagtcgacccagcgtggcgattacgaaatgttcaggaagtactcgaaccacatcaacgacacctccaaccgtctgatgacgctacgaggcctgatgaagttcaagtccgaccgcaagccgattgacatctccgaagtcgagccggccagcgagatcgtcaagcgtttctccacgggtgccatgagctatggctccatctcccaggaggcgcacgaaaccctcgccatcgccatgaacaccatcggtgcgcgttccaactccggtgagggcggcgaatccgaggaccgtatcaacgacccgttgcgctacagcaagatcaagcagatcgcctcggctcgcttcggcgtgaccagcgactatctcgtgcatgccaccgacctgcagatcaagctcgcccaaggcgccaagccgggcgaaggcggccacctgccaggtgccaaggttccgccgtggatcgccaaggtgcgtcatgccaccccaggcgtggaactcatctccccgccgccgcatcacgacatctattccatcgaggatctgaagcagctgatcaacgatgcgaagatggccaatccgaaggcccgcattcacgtcaagcttgtctccgagttcggtgtcggcaccattgccgcaggtgtggccaagtgccatgccgacgtggtactgatctccggctatgacggcggtaccggtgcggctccgctcaacgccatcaagcatgccggcactccgtgggagatcggcctgtccgaaacccagcagacgctggtactgaacggcttgcgttcccgcatcaccgtgcagtgcgacggcgagctcaagaccggccgcgacgtcatgatcgcagctttgctcggcgccgaggaattcggtttcgccacggctgcgctgatcgtcgaaggctgcgtcatgatgcgcgcctgccagaagaacacctgcccgcagggcatcgcaacgcaggatccagaactgcgcgcccgcttcagaggcaagccggagcatgtcgtcaacttcttcatgttcattgccgaagaggtgcgcgaactgctcgcccaacttggcttccgtacgctggaggaggcggtcggccacgtcgaatgccttgatcagaacgatgccatcaggcgatggaagtccgacggcatcgatctgagcaatgtactcatgcagccgggcccgattccgggaaccatcctgcacaagaccatcgatcagaaccacgagctcgataaggcactcgacaacaagctcatcgaacttgcccaaccggccctcgacaagaaagagccagtgcgcattgaaatgccgattcgcaacgtgtaccgtacgcttggcaccatggtcggttacgagatcaccaagcgctatggtgaggagggcctgccggatgacaccatcgacatgacgttccacggcgccggcggacagtccatcggcgcgttcatcccgcgtggcgagaccattcgtgtgtacggcgaagtcaatgattacgccggcaagggtctgtccggcggccgcatggtggttcgcgcggaatcgaatgtctcattcgacccgcatgagaacgtgatcgcaggcaacgtcaccggcttcggtgcgacctccggacagatgttcgtggccggacgcgccggcgaacgcttcggcgtacgtaacggcggcgccaccttcgtggtggagggcgtgggcgaccacggctgcgaatacatgaccggcggcacggtcgtcatacttggctccaccggccgtaacctcggcgcaggtttctccggtggcaacgtgtacgtgctcgatctcgacatgaagcaggtcaatccggcggccgccaccaatggcgcgctgctgtttgagccgctcgacgccgaagcgaatgaactggtgcacggtcttgtcaagcaacatgccgaggagaccggctccgccttcgcggaaggcctcctcgccgactgggagaacagcgccaagcggttcacccacatcgttccgaagcacttccttgccatgcagaaggcgatgaagaacgccgaggagaacaacatcgatttcaatacgcccggcgtctgggaacaggtgtacgagcaggttatggaaggagcgcgctgacatgggagatcctcgtggattcctgaaggtccgtacccgtcgcgaactagccgaacgccccattgaggagcgcatcaaggactggttcgacgtccacgccgaatccggcctgcagccgtggaccaccgaacaggcggcccgctgcatggactgtggcactccgttctgcatgagcggctgcccgctcggcaacatcatccccgaattcaatgatctggtgcgtcaggagaagtgggaggacgcatacaatcgtctgtccgaaaccaacaacttcccggaagtcaccggccgcatctgcccggctctgtgcgaagccgcctgtgtgctcggtatccaccaaccggccacgatgatcaggaacgacgaatgcacgatcatcgaccaagcgtgggatttggactatgtcaggcccctgcccccgcagcgactgaccgaccagaccgttgccgtggttggttccggcccatccggccttgcgtgcgcgcaacagttgacccgcgccggccataccgtggtcgtgtatgaacgtgatgacgccatcggtggtctgatgcgttatggcattccgaacttcaagctcgacaagcgactcattgaccgtcgtgtggagcagatggaggccgaaggcaccgtgttccgcaccggcgtggagatcggcaaggacatctcctgggatgatctgcgttcccgttacgacgccgtggtggtggccatcggctccaccgtgccacgcgatatgaaaattcccggccgcgaactcaagggcatccatttcgccatggagttcctgcccgacgccacccgtcgcgtgtacggcgtcaaaccggtcaacgacatcaccgccgaaggcaagcacgtggtgatcatcggcggcggcgacaccggttccgactgcctgggcacttccatccgccagggcgcaaaggacgtcaccgtgctgcagattatgccgcaggagccgaccgaacgtccggacaaccagccgtggcccaccttcgcgcgtctgtaccagaagaccacttccatggatgaaggtttcgagacccagcgtgccgaatacgtttacagcaccgattcggtgaatttcgtcggtactgaggaggaacaggccaaggtcaaggtggaggacgccaccgccaccgaaggtttcgtggcggacgagaacggccacgtgaccggtttgaaggtcgtgaacgtcgcaccgggcgaaaatggtccatttacccgtcagccgggtaccgaacgcgtgattccggctgacttggtgcttatctccgtgggcttcctgcatccggataccaccacgttggtggaccagttgccggtcgacctcgatggccgcggcaacgtggcgcgtaacgacaagttcgccacctcccaggacggcgtctttgcctgcggtgacgccggtcgtggccagagcctcgtggtgtgggccatttccgagggccgttcctgcgcggccgccgtggatgagtacctcaccggatccaccgagctgccggctccgatcgtcgcatccaagcgaccgatgatgcttccgcgctgagtgacagcacggtagaagacgaacgtaatcgcacgtgagacggccttttccgaatcaacgggaagggccgtcttgccgtatccgactccgagccgttcaacatcgaccatttcaatatcgaccatatgacgtgctgcgttcatgaaaaagcggcgggcgtgcggtagagtggcatgcagcaacacgtaacaaaggagtgcttcaatgccaaaccgtgcagaacgccgagcccaagccaagcagaatcgcaggggagtgccgcaacagtacgaccagacccatggccgcgcacgttccggaatgcttgacgaataccaactgcaggagaagtcccgtaggttgcaggagggcacagacgggccgtggaagccgaccggtggcacggtcgaagtgaccgaaaacctgctgacgaccaacccggactatacgaatccgaagatgttcaaggctccgcattccacccgccagtggttccgtgtggccagctgggtgctgatcgcgctgtcggccatcgcctttttcgtgatcatgtggctgccgcagcatccgatgtggctcatcgccacggtttccgcggtcttcgcggtaggtgtgatcagcctgttcttcactgcgggcaatccgcggcacaatccgaaccttgatcagaacgggaccgccgtctgatgcggagtcgttgcagacgtctctgaatatttgcagatgatattgaatacaacgcacgattgtcatgacacgaatgcaacaatcgtgcgtttcgcattgtcttggcctaaagtggaacacggaacgactatctgactcgaagaggagagtgcagttatgaaggttgacatcctttcccgggaatacccaccgaaggtgtacggcggcgcaggcgtacatgcggaagagctttccaaggtgctggcggaacgtgtcgacgtgaccgtccgtgcgttcgacggcccgcgcgccgaagccgatgttcccgccattcccggcgatgccccgaaaggctcgctcacagtcgtcggctatgacgttccgaaggaattggaaggcgccaatggcgcgctgaagaccttcggcgttgacttgcagatcgccaacgacgtcgatgccgacatcatccacgcccacacctggtatgcatgcctggccggctatctcgccaagatgctgcatggcacgccgctggtcatcaccgcgcattcgctcgaaccgttccgcccgtggaagcgtgaacagctcggcggcggctacaacctgagctcttgggccgaaaaggacgcctacgagcataccgaccgtgtgatcgccgtgtccgcgggcatgcgtgaggacatcctcaccgcctatccgaacctcgacccggacaaggtggtcgtggtacacaatggcatcaccatgagtcagttcgaaacccccgccgacgacgatccgggttggaaggtgttcgagcgctatgacattgaccggaacaagccgaccctgctgttcgtcggccgtatcaccaggcagaagggtttgccatacctgcttcaggcgttgcacttcgtcgatccgggcattcagatcgtgctgtgcgcaggtgcgccggacactccggagatcatggaggaggtcaagacggccttcgccaagcttgacgaggaacgcggcaatatcatctggatcgaggagatgctgccgaagccggaactgaacgcccttgagcatggctgtgacgcgttcatctgcccatccatctacgagccgctcggcatcgtgaacctggaggccatggcatgcgggctgccggtcgtcgcctccgccaccggcggcattccggaagtcgtcgtcgacggcgagacaggctatctcgtgccggtcgaccagttgcatgacggcaccggtaccccgaccaatccggacaagttcgtacatgatatggccgacgccatcaacaggatcatggccgatccggagaaggcgaagaagatgggacaggccggctatgagcgtgcacgggaccacttcagctgggaatcgattgccgacaagaccgtcaaggtctacgaggatgtgattgccgaacaggagtagccgcaaatcgcctgtcggtccatgaccgacaggcagacgcaggccattcgacgcctcccgtcatgcattatgctggcaggaggcgtttcgcatatgcgatcataggatgattatcatggcgcaatcctatgcagaaggagagggagaaagcatggtcgagcaggacacggcactgaaacttactgacgtggaatttcgccgcaacaggcgcgtgatcctcaccaaagtcaatctggaaatcaaaaaaggtgagaaatgggtgctgttcggacccaatggcatcggcaaatccagtctggtacagatgatgagcactcgcggattcccgtcctgcggcaccgtcgacatcctcggcaaccgattgggcaaggtcaacgtattctcctaccgcaaccgcatcggactgagctcggccgaactggggcgcgcgttccctccccaggaggatccgctcgacgctatcgtgaccgcgttgaccgccatcaccggccgttggcgtgacacctacactgatgaagattatgccaaggcgcgttccctcatgcgcgaattcggtatcgaatacctcgaaggcaagatgatgttcaagctttcggagggcgaacgtacccgtgtgctcatctgccgtgcgctgatggctgatccggatctattgattctggacgagccgaccaccggtctcgatctgggcggccgtgaaatcgcgttgcgcgcgttgagccgtgtcggcgcggaggaatcggaccgtgccgtgctgctggtcacgcaccggcttgaagagattccgcagggttttgaccatgtggcgattatgggtcgcatcaccggcaacgaggcggacgcctatgcggacaatgtggccggtaacgatccggctccgggcaccatcgtgtatacgggcgacctggaacatggcttcacttccgagcggctgagccaggtgttcggccttgatttgaatgtgacccatgcgaacggacgatggaacgcctacgccgtatgatgccttcgccgttgcgcgtgcgatagcatgagtagtcgaaatcagctatgcatgaagaacatgaaggagtgattgatgcgtcgaggaccgcttgaggccggagagaaagtgcagtttacggaccgcaggtccaacaagatcaccgaccagctcgtgccgggcggcgtgacgcagacctcgcacggcatcatcctgcatgatgaggtgatcggacggacggaaggctccgtaatcgtgacggtcagcgccaaacgtgaggcgcagatcaaccaggaccatcccgaacgcgacgccaacaagccatggaagggtacgcgtgccatcggcggctgggaattcgccgtgatgcgtccgcggctggccgattatgtgctatccatgccgcgcggcgcgcagatcatgtatccgaaggacattgcgcaggtaattcagctcggcgacatccgttccggcatgaacgtgctcgaatccggtgcgggctcgggcgccatgagcatcaatctgttggatgcggtgggggagggcggcaggctcaccaccatcgagatgcgttcggaattcgcgcgtgtggccgaagccaatgccacgatctatttcggcggccgccctgcatggtgggatctgaaaaccggcgatttcgattcggttgcggccggactgccggagcattccttcgaccgcatcatgctcgatatgctcgacccgtggaaccggctcgaacaggcataccgcgtgatggcaccagggggtgtgctcgtggcatacgtgaccaccactacgcaactgagccgcatggccgaggcgttacgtgacgcgggctgttggaccgaaccggacattcaggagacgctggaacgcaactggaaggcgcagggactggcgattcgtcccgaccatcagatgatcggacataccggtttcctgatggtctcgcgggccatggcccctggattccaagcgttgcgcaaacgtgaccgtgccacgaaggacacgactaccgacattgactcactgagtgccgaggaacgcgccgaacagctcgaggatctcgagctacgtgacatctccgaccgcaagctgcgtaaggtgttgcgtgacctcgacgcgcaggtgaacgcaatcgacgaataatgcgcgggtcttgccatgtgttctgcgacaatggaagatgcgacgggtaccgttgtaagcctgaaccgaagatggggagcatgcgaccatgggaacaagcctgaagaaggttgccaaaaaggccaaggattacaagtatgtgttgatggtgatgcgtcacgccaagaccgagccatttggcaacggtggagatgccggccgtgagctcaccgacaaggggcgcaaacaggcgaagtcggtggccaagggattggcgtccttcaagctggttccggatcgcatagcatgttccagtgcgacccgtgcgcgccagacctgcgaccgtatgctcaaggtgttcggcgatgacccgaaggtcgattatcggcagagtctgtacgaaggcggcgtgcaatccgtgttcgacgaacttgcgcaaaccaaggagaaacgccgtacattgctgattctcggtcatgaaccgaccgtatcgatcgcatgccagtggattgccagctccgaatccgatccgacattgcttgacctgttgaatctgggcatgtctccagcctcgatcgccgtgttcggtgcggacgagccgttcaaccaatggcagctgcacagcggcgaactcatcgccctgcttacggccaaggatttcgactaggcccgggttcatggcgggagaacgaccataacggctggcgggaacggctcccttaccgctctgcttgggcagtgtttcacggcggacactgttttgcacgtggcttgtcttttcggacaagagactggtaaaccgagttggaagaatccggggtctcctgaacgccatggcttccgtgacatagcagtaggaagtcgagcatgtttggcggcgaagctgacatataaggccgatttataacgacattcaaattttcctaatgccttatagcaaggcattctgtgatagcttgggcgggttgcattgttcatgtcagatggaggatttatgtccgctctcacttccgtctccggttttccgcgcatcggccaaaaccgtgagctgaagaagattattgaagcatattggaagggcaacgccgcccttgatgaggtgcgtgccaccgccaaggagctgcgcgccaagcactggaagttgcagcaggccgcaggcgtcgatctgattcccagcaacgacttcagctactacgatcagatgcttgacaccgccattctgctgaacgtcattccgcagcgctaccagcgtctcgccttcgataatccggaagagaccctgttcgcgatgggtcgtggctaccagggcgacaagggcgacgtgaccgccttgccgatgaagaagtggtttaccaccaactatcactatcttgtgccggaagtcgatgcggccaccgatatcaagctcaacggcaccaagccgttcgacgaattcaatgaagccaaggagcttggcatcatcaccaagccggtacttatcggtccgtacaccttccttaagctcgcccgcaacccgcaggccgaagaactcgaatacgacaagggcctcgtgaacgcggttgccgcggtctacgccgaaatcatctccaagttcgcggagcttggcgcggaatgggttcaaatcgacgaaccgtacctcgtactcgacaaggaaccgggcgacgtggaactgttcaaatccctgtatgccaagatcctgcccgcccgcgaaggcaagatcaaggtcctgcttaatacgtacttcggtcacattgccgatgtctatgaaaccgtcaacctgctcggcttcgacggcatcggtcttgacctcaacgaaggcaaggacgaaaacctcgctgccgtcgaacagtacggcgtagcggaagacaccactctcttcgccggcgtggtcaatgggcgcaacatctggcgcaacaactatgccgtgagcctcggcctggtcgatgccctgaagaaggtcaccgacaacgtggccgtctccaccgccagttccttgctgcatgtgccgttcagcaccgaaggcgaggacggtctcgccgacgaggtgcgcaggcatttcgccttcgccgtcgaaaaacttgatgagctgcacgaagttgccgtgctcgccgacgccagtgaagacgagaaaaaggcctccgccgaactcaaggccaatcaggcgctttttgatggcacccgcgtcgccgtcgaccaggccgtagccgatcgactcgccgcactgaacgccgacgatttcgttcgtcagccggcccgcgccgagcgtcagaaggaacagcgtgaggccctcggcctgccgctattgccgaccaccaccatcggctccttcccacagaccaaagaagtgcgtgccgaacgtgccaagctgcgtaagggcgaaatcaccaaggccgaatatgacgacttcatgaagtcgcagatcgacgcctgcatcaggcatcaggaggatctcggactcgacgtgctcgtccacggcgaattcgagcgtaacgacatggtcgaatacttcggccagaacctcaacggattcctgttcaccaagaatgcctgggtgcagtcctatggcacccgttgcgtcaagcctccgatcgtgtggggcgatgtgtcccgcgccaacccgatcaccgtggagtggagctcctacgcgcaatcccgcaccgaccacgtgatgaagggtatgctcaccggcccggtgaccatcctcaactggtcctggccgcgcgaggacatcacccacgaacagcagacccagcagctcgcgctcgccatccgtgacgaagtgctcgatcttgaggctgccggtatcaaggtcatccagatcgatgaggccgcgttgcgcgaaaagttgccgttgcgtaagaccgactggcataagaaatacctcgactgggccattccggcattccgtctggtgcactccgccgtcaagccgaccacacagatccacacccacatgtgctattcggagttcaacgacatcatcaaggacatcgatgccatggacgccgacgtaatctccttcgaagcctctcgaggcgatcttgtggtgctcgatgccattcacgacgccaacttcgaaaccgaagccggtccaggcgtttacgacatccactcgccgcgcatcccgtccgaacaggagatcgaggaacgaatccatgagatcctcaagaagatggatgtcgaaaaggtgtggatcaatccggactgcggcctgaagacccgcggcaacgccgaaacctggccgagcctcgaacatcttgtgaccgcggccaaggccgtacgcgccaagctcgccaggtaaggtgcaaagcatcccatgcattcaccactgttttcgcttgaggtattcccgccgaagcgaacctcccctgtaggcaccatctacgacacattggatggcctgcaggggctggatcccgatttcatttccgtgacctacggtaccggcagatcatccgaccggacgctcaccgcgcgcattgcgcataccgtgagcgaatacggcataccctgtgtggcccacctgaccgcacagtacctcaataaggatgatgtcgatcaggcactcgacatgtttgacgaagccaaggtttccggcgtgctcgccctgcgtggcgatcgcgtggaaggtgccgaaccggccggcgtctttgagcacgccagcgatctggctgcctacattcgcgaggaacgtccgaatctcaagatctacggagcctgctatccggagaagcacccgcagtcggccacgctggaagatgacatcgacaatctcaagaaaaaggtcgatgccggcgtcacgcaccttatctcgcagctgttctacgacaatgaggattttctacgctttctcgacaaggtgcgtgcggtcggaatcgagataccgatcgaggccggcatcatgccggtgatgaacgccaaatccgtgcgtcgcatggccggaatctgccagtctcgcgtaccggcgaagctggaagtcatgctagacaggtggggcggcgacaatgccgtactcaaggaggccggcatcgcctacgcctccgagcagatcagcgatctggtggcgcgtggcgttgacggtgtgcacctgtatacgatgaaccacccttgcgtcagcagacgtatctggtccaacgtcaaaccatttttcgtctgacgccagacgatgcaacaaacacgaggggcggtcgcgagcatttcgcgaccgcccctacgtcattgccgacgctatattaaataccatgggttctatgcaacatacgtttggagtgcgcgagctgattcgtgccggactgcaggatctcgacagagcacgcgagctcctgcaggaactgcaggacaatggcgtaagcgacgatcggctgcaatcgttgatggctacgttggaacattcctgcgaccccgacgtggcgctacgtaatctcatcgatatcatcaaagcactgcagagccaaggcagaaggttcgacgacatcgtaacgagcggagagggtcttacccggcttgtcaccgtgctcggcgtttccgacgaaatgggcaagctcatgcgcttcaggcccgaactggtcgcagccgccgccaatgacgcttgcgaaagccacctgtacaatcacgcacaacggcgcgcgcatgtactcgaagcggtaggagccgacccgcaggaatccgccatgcccaaggccagtctgcccctgtcggaggcggcgacggcattgcggcaaacctatcgcaagcaactggcggccatcatggcacaggatgccatggaaaccgatcccaccaccattcagccgcgtatcagccaggaactgtccgacctggccgacgcggcgctcgaaggcgcgctcgccatcgcccgtaacgagattgagggcagcgagcatgtacgtttcaccatcatcggcatgggtaagctcggcgcgcaggagttgaactacgtttccgatgtggatctcatttacgtggtcgaaccagccgatcccgataccaacggcatgacgcttaatcgtatcggcaccaaactggccactaccctacagcgcgtatgccagtcggtgatcaggggcgtagccgaaccgactctgtggcagatcgacggtggattgcgacccgaaggcaaggacggtccgctcgttcgcagactcgaatcgcacgaggcatactacgagcagtgggcggagaactgggaattccaggcgttgctcaaggcgcgacccgtcgcgggcgatcccgagctcggcaaggcttatatggacatgacccggccgttcgtatggaccgcatccaaacgtgacaacttcgtctatgactgtcagcaaatgcgcaaacgagtcgaagaccttatcccggcaccgctcaaagatcgtgagatcaagcttggtcgcggaggtctgcgtgatgtggaattcaccgtgcagatgctccagctcgtgcatggtcgttccgacgaatcgctgcgtacccgctccaccttggaatcgttgcaggcgctggccgatggcgggtacgtgtcgcgcaagcaggcaaaaaaactttcctgggactatcgcttcgaacgagtgatggaacaccggcagcaaatgtgggccctgaaacgcacgcatctgttcccggatcttggcaacgccggtctcggcggcatcgagcgcaagcgcgacgtcgatgtggatgcgttgaaccggaatctcgaattgcgcaggctcgcgcgtgccttccacctgcatccggaagaacttgtcgacaaatacgacgagacccgccgcgaagtacgccacctgcacatggacatctactatcgcccgatgttgccgatcaatgccggcttggatgacgagcaggtcgaactgtcggagaaggccgcacacgagcgtttcgaatccataggattcgccgacgccgacgccgccatgcgccacgtcgtagcgcttaccgccggtatatcccgtgccgcaaagatcaaccggatcctgctcccggctgtgctgcagtggcttggagaagggcagaatcccgacatgggcctgctcaactggcgcaagctcgaagagaacttcggcacggaaagcgaatacctcggattcctgcgcgattcgccatccgcggcgcaacgcctgtgccatgtgctttcaaattcccggtttctcggcgacgcgctcaacaaatcggtcgaatcggttacctggctcggcaacgatgaggaactcaaaccccgtacgcgtgaaagccttgacattcagaccaaggccgcactggaacgtaatgcaggcagcatcaacgatttcgcgaattcggtacgtgtcatgcgcaggcatgagatcgaacgcatcggcctggcttggatgagcggcgtgaccgacgacgcgacttcgttggccggcatgaccgacgtgtatgacgccatcatcgaggcgtcgttgcggtgggctatccgccatcagcttgacgaaatgcggtttgatgaagcgccggccgcaatcgccgtcatcggcatgggccgttacggcggcagggaggtgaatttcagctccgacgccgacgtgatcatcatctaccgtccgaccgaagaggctgacgatggtcaagccaacctattcgcgcgcaaggtgcaagaggatttgcgtgccatcctgcaaggtcctaccaccttcgagccgaagatcgagctcgacatggacctgcgcccggaaggcaagaacggcccattggtacgctcctacgcatcgtgcgaggagtactaccgttcatgggccagcacgtgggagcatcaggcgctgttgcgtgcccgccatgccgccggtgacgtcgcactggccgaggattttcttggcaacattgccaatccgctgcgctatccgaagacggatccgaccgaaacgcaaatcgccgaaatccgtaagctcaaggctcgcatggaggctgaacgcctaccgcgcggcgtgcgtagggagcgccatctgaaacttggcaaaggcggtctgtccgacgtggagtggaccattcagctattgcagctgcaacatgcgggggagaatgcgaacctgtgcgtcaacggcacgttggaagcgcttgacgagctggaacgtcgcaggttgattgacgccggagatgccgtcatattacgcaaggcgtggcgcatgtgcaccgcggcccgcaacggcagttatctgtggagcgggcgtgtcaatcaggccgacattttgcctgatgacacatactcactcggaggcattgcggtctatctgggctacgacgcgaaccgcggtcagcatttcgaaaacgatttgcttgccgtaatgcgcaagagtcgcgacgtaatggagcgactcttttatggtcgcgcatgacatgccagccacccaataccccttaaatcgttatctgcccgccgtgtgagcattgcgacgaataatccgagtgtccgattttgaaaagggtcgtaaaacagccgtttctcgaatcagattaatatggtcactcgtttttccgctcacacggcgggcagataacgatttaaggggtatgtcgtagtgtgtcggagggtcagtgcacgtacatcgacagcacaatggccaccaatgccacgaaaaccgcggagcagatggcgagtatcgcattgccgtgtttgcgtgtaccgaataccgttaccagcgagatgacggcgaatacgatggacacgtctacgaaaatcgaacagaagaatttggccagtaccggtttgccaaatgccagcggaatggaaatcacggcgaatacgattgccgtgattgcgcttttggaaatgggtttcttcgttgaattgcttacgttgctcataaggacaatactcctgctgcagtttgacattctatgtataggttcatagataaaacataggcgcatggtcatgcgaatacactggtgagtgtcgccatattcggacagggaagattgtgatgctaccagattctcgtgtgaagaagaccgttgctcctcgcgtgcccacgctgaagaagccgtccgtattggctgagatgcgtatgggcgcggtcgagccggaaggctcctatgacaccatccgcattgaagggcaacatgccgccgatgcaatctcggattggacgttgaccacctttctggactgctctctggaaaacctgacgttcgaaacggtgttgttcgaccatgcagccatcaccagtacgaggttcgccggctgcggcatggtgcactcgtcgttcgtgaacgcgtccatatgctcaagcacctttgaacactgtcggttcggtgcctgcgatgcttgggattgtgagactcgatccgtcatattcacaggctgccggtttggctatcttaacttgcgtggcgccaagtggcacgacgtggtctttcaggattgcgtgatcgacgatttcgatgcggctcatgcggtgctgggacgcatcgcgttccccggtaccacgattcatgccatcaatctgcagcatgccgtggccgatgacgttgatctacgtggcgcagaactgcaggagattcacgacgtcgccggcttgcgcggcaccaccatgctcgtagaccagatctcccaacttgcccagtccttcgccgccagtcttggcatccgactggaggagcctgagggctaggaatcatgaacacgcggtgaatgggagggtcagtggttcaggctatagttggctaggtcacttcgggtggccaccttcaactacaagttgcatgaaaggtgagccgttgtcctcagtactcgaaccggcgacagagacgccgatggtcggaaaaagcgtcatcactcttgacgatctttccattcgtcagattcaggaactgctgcacaaggcgcagtacatcgattcccatcgcaaggaagtggcgcacacctgtgaaggcagggtgcttgccactttgttttatgagccgagtacgcgtacccgactgagcttcgaaaccgccatgctgcgactcggtggcaaggtgatcggttttgccggcgcccagctcgcctccgtgaccaagggcgagaccattgccgataccctgaagaccgtttccaattacgttgatgtggtcgccatccgccatccgaaggagggcgccgcgctcgtggcttctcgcgcagcatccgtgccggtcatcaatgccggcgatggcgggcacatgcacccgacgcagacccttgccgacctagccaccctgcagtcccgtttcggacgcatcaccaacctgaccgtcggattgtgcggcgatttgacgttcggtcgcaccgtgcactccctgatcgaaacgctgtgccgcttcggtaacgtgaacttcgtacttatcagccctgacgagctcaagactccgcgttatgtgctcgaccgtatcgatgccaccgaatcctgctcctacacggaggtcaaggacctggcttccgtaatcggcgaccttgacgtgctgtatatgacccgtgtgcagaaggaacgcttcttcaacgaggatgactacctgcgtctgcgtgatacctatattctcgacgaagccaagatgagcctcgccaagaaggacatggccgtgctgcatccgctgccgcgagtcaatgaaatcgcagttgaagtcgatgacgatccccgcgccgcctacttcgagcaggtcaagaacggcatgcttatgcgtatggcattggaaagctcggtggtcggcgacagactgccgggatacgaaccgcttgaatcggaggaggttgcggcctgatggaagtcactagcattcagaatggcatcatcatcgatcacgtgcctgccggcactgcgctcaaggtgctcgaatacttgaaaatcgacccgtccaagaccaaactcgcgttgatcatgaacaccgacagccatatgtatggtacgaaggacatcatcaagatcgaagatgagaccgaagccgtcaacctggatgtgcttggcctcgtggcccgcaccgcaaccgttggcgtggtgcgtggcggcaagatcgtcgaaaagaagcagccgacgctgccggagcatgtcgtcaacatcatcaaatgcgtgaatccacgttgcgtgaccaccaccgaaccggccgtgcagatgttccatctggtacactccgaccgtgccgaataccgttgcgattactgcgatgaggaagcgaagttctgacccatggccctcacccttcacgacatcaaggtctggaataccggcgaagtcatcgacctgatcgttcctgccgacaccgacgagaccgtcgacgcctcagccatgaccatcgcgccgggcttcgaagacccgcatgtgcacttccgcgatcccgggcagacctacaaggaatcgatggtgtccggctgcaccgcagccgcttcaggtggttacacgaacgtactcatcatgccgaacaccgttcccgccatggatggcgtgaaggtcaaggccggtcagcagggcgcttccgaggtgcttgatgccggttacgataccgtcatcgattatctgcagcattacgaagcggtccatgatgtgaaactgccggtccgctacgatttgtgcgtatgtgcgtccaagggtcgtgccggcaaggaggctaccgatgtggccgactggatcggctacctgccggggcatggcgatgatgggaaggacccctaccagctggcccatccggtgaccgccatcagcgacgacggttccgccgtcaccccggagattcttgatcaggtattcaccaatgtcaaggagtccggtctgtacctgatcgagcattgcgaacatcacgacaccggtgcggttaacgacggcccggtctcgcgcaaactcggtgtgcccggcatcccggaggacaccgaattgagaatcgtcgaacgtgacatcgagatggcacgcagaaccggcgtgcacgtgcatttccagcatgtgagcaccgcaatctcattcgatgcgattcgcaaagccaaggccgaggggctgccgatcacctgcgaaaccgcgccgcactacattgcactgtgtgatgaagcgttgctggaatacggcacgctcgccaagatgaatccgccgcttcgctccgaagccgatcgacaggccaccattgcggccgtggccgacggcacggtcgatcttttggccaccgatcacgcgccgcacaccatggaagagaaggaactcggcttcctcgacgcccccaacggcatcatcggcctcgagtgcgcctatggcgtgtgccataaggtgctcgtcgacggcggtcacatttccgatgagcgactcatcgaactcatggcgaccggtccggcaacgctcatgggccacgagaacaccgacatgaccgtgttgctcgacgagaacgccgatgcggttcccggtgactccaacaccaagcgagtgcttgacctcggtaaggtcgcgcaccccgaaaatgtagacttggtggtgctcgacaccaccgaggaatggatcgtcgaaccggagaagttccattcctcggcacgcaataccccatttggcggatggcatgtcaccggccgtccgctggctaccgtcatcggctcgaagctggccttcagccgcatcaacaaggaggattgatggaccgtctgatcgaagcgatcgaatccaagcagaatccgagcgtcgtcggactggacccgaccgaaaccctcgtgccggcacagattgtgtcggacttcgccgacgaaatcgccgaacaggtcgaagatcccgcagaggcgcccgctgctcagctgtccgtcgccttcttcgaattcaaccgtgccgtcatcgacgccgtggccgacatcgtgccggccgtcaagccgcagatcgccatgtatgaggctctcggtccggcaggcatcgacgcctacaccatgacttgcgagtatgccaagcagcagggcctgtacgtgctcggcgacgtcaaacgtggcgacatcggctccactgcggctgcatacgcgcaccatctgagcggcgtggcggagcagggaaccgtcttcgatccatggcatgaggacgccgtgaccgtgaacccatatcttggcaccgacggcatcaccccattcgtcgatgcggccgccgccaccgacaaggacatcttcgtactggtacgcacctccaacccgtccagcagcgaattgcaggaattggagcttgcctccggcgaacgcgtgtacgaacacgtcgccgacctgatcgaaggctggggtgccgaaaccatcggcaggaacggctattcccgagtcggagccgtggtcggcgccacgcatccggaggagggcaaggcactgcgcgcccgcatgccgcacaccttcttcctggtgccgggatatggagcccagggcggcaccgcacagggcgtggccggcatgttcgacaaggacggttccggggcactggtcaactcgtcccgtggcattatcggcgcatggatgaagtccggcaagtattccgacggcatgagcgccgaatccgcgcttgaactggtcgccgaatcggcccgcgaagccgccaaggacatgcgcgacaatctgcgcgcggtcctaccctgagtccaggcgagccaagccaaattcgtaattttttcaagccaaaccaccgaacgcaacagagagggagtccatgaccaccgcaacaacgttcgctccgaccgtcgccgaggcgactgaggccggcttctttccaagccgccacgaggtcgagatcgttgataaccgggaactgaccgacggcgtctatcgcctgaccttccgagacgaatacatcgccagccatgccgagccggcgcagttcgtcgatgtgtattccaatgatccgaccaggctcatgccgcgtccgttcggcgtggccgaggtcaacggcgacgaagtaagcctgatgtttgccgtggtaggcaagggcaccgctgaattcgcgaagctgcaagccggagacgccgtgcgcgtgatggggcccctgggcaactcgttcaagaccaaggagccggccaattacgtattggtcgccggcggtctcggcgtaccgccgctagtacgggccgcacaggccatcgccggcatgcagggcgcgacaagcactgccgtattcggctaccgcaacgtgcatttcggcgacgaatacgtgggcagatatgccgattcggtgtacagcatcgatgagtccgaaggcaacgtcatcaccttgcttgaccgaatttcggatgaactcatgaacggggaactgaagccggtcatcctttcctgcggaccactgccgatgatgaaggccgtggcggcgtgggcggccaagcgcggcatcgaatgccagctgagtctcgagcagcgcatgggctgtggatacggtacgtgcgtgctgtgcacggtcgacacgttggacggacgactgaaagtatgctccgatggaccggtgttcacacgcgaacgtttgggatggggtgagtgaaggcatgacgactgacaacatgcagcacggcaatctgtacgaacgatacgagtggaagcaccccacccaggtggcgggcgtttcatggaagaatccggtcgccaccgcttccggcacgttccaatacgcggctgtgcgttggttctatgatgtgagccagcttggggcggtcaccaccaagggcgtctctccggtgccatgggagggcaatccgggcatccgcaccgccgaaggcccgtccagcaacatcaatgcggtcggtctgcagaatccgggcgtcgaccactatctggaggatgacctgcccaaactgaaggccatcaacgcgaatgtcattgccaatgtggcaggccactgcgatgacgattatgccgaagtcgtggccaagctcaacgattcaccagccgacatgctggaaatcaacgtgagttgcccgaacgtatccgccggcggcatgagcgtgggcaccgatccggtggcgttgagccgtctgattactcgcctgcgcaagatcaccgataagaagatgatcgtcaagctcactccgaacgtcaccgacatcaccgttccggcacgtgcggccgtggaaagcggtgccgacgcgctgagcctgatcaacacattgctcggcatgcgtatcaacattcgtactggcgagccgatcatcacgcatgtgaccggcggagtgtccggtccggccgtattgccggtgggtcttgccgccgtgtggcgcgtgcgcactgcgttgcctgaggttccgattatcggcatcggtggcattgattccggtgaaaaggcgcttgaatatctgtatgcaggcgccaacgccgtggaagtcggtgcggccgcattgttcgagccgaccgcgcctctgcgtgtggcccgcgaacttgacgccctgcttgacacacgtccggaactggctgacaagctcgccaagggcgaaacctggcgctaacgaccattcatcgcatgaaggagtgactatggaatcccttgaccaccgttttaccgaattcctgctggagtcgcaggcgttgaagttcggtgaattcacattgaagtccggccgcaagtccccgtacttcatcaacgccggcgccttcaacgacggcaggaaaatcgcgacactcggcgcattctatgctgaaaagatcgcagccgaaatcgaagccggcaacctgccggaagacatcgacaccgtattcggtccggcatataagggcattccgctgggcgtctccaccgccatcgccctgacggccgggcacggcatggaagtcggctacacgttcgaccgcaaagagaagaaggatcacggcgacggcggcatgatggtcggcacccaactgaccgacggcatgaaggtgctgctcgtcgatgacgtgatgaccgcaggcaccgccgtacgcgaggtcattccgaagctgaaggccgaagcgaacgtcgaagtcgtgggcttggtgctgtccgtggaccgtatggagaagaccaaggactccgacacttccgcagtgaaagccgtcgaagcggaattcggtttcccggtgttcgccatcgccaacgtgaaagagatcttcgaagccggccagcacatcgagaccgcagacggcgccccgtatgtcacgccggagatcaaggccgcagccgactcctatctcgaacggtatggcgcctgaccgctcgatacttgccgaatatggaagatcctccttcacgatgaaggaggatctttgttaatcgatgagattgtatccgtggtcggcgacgaccgacttgagtttttcaagatagttttcggccgccttcgacagcttcgcacgctcgttggcgatccagccgaccagcatcgtctcgtcggtgtcgagcggcacggtcacgatcttctcgttgttgaggtcaccgttgtcgatgccggtgcacaccgtgtaaccattcagaccgatgatgaagttcaggatcgtggcacggtcggtcacgttgatctgcttgggggagtattccggccagaccgcttcctcggcgaagaagaagctgccttcctcgccctgctcgtattgaatgaacgggaacggcttcaggtcttccatcgtgaccttcttcttgccggccagcggattgctgcgtgagatgaatacatgcagcggcgcgcggaacaacggatggaattcaagatgcttctcgcgcaacatcttgccgatgacgtccttgttgaagtcggacaggtagatgatgccgatctccgacagcatgttggcgacctggttgatgatgtccttcgtgcgggtctcgcggatcgtgaactcgtattcatcggacttaatggaactgatcatctccacgaacgcctcgacggcgaacatgtaatgctgcgtggatacggagcacaactgcttgcgcggcttcgcgttcttatagcgctcctccagcagggaagcctgatcgagcacctgacgagcgtaggtgaggaattccgcgccatccacggtcaacgcgattccttgggacgagcgggtgaagatctcgatgcccagctcgttctcgagttccttcaccgaggaactcaacgccggctgcgacacgtacagctcgtgcgaggcttcgttcatggagccgcattcgacgattttgacgatgtacttcaactgtaggagagtcataacacccatttatagcagcggccatttacgaaagagcagtttataacgttcggtttctgcattgtggacggatgcattccgccatcggcatatcgcgaccatggcggaatgactatgcccggacgatcagatccgcactcccaaagatgcaaggtccttgcgagcctgttcggcatcgacgaagcggaaggcgtggatgcccaccttgccggctccgtccacgttcttcgcggtgtcatcgaagaataccgacctttcggcttcgatgccaaaacgttgcagtgccagctcgtagaaatcggcgttgggcttgaacatcttctcctcgcccgacacgaccgtgccgtcgagaatttccgtaagctgcggaaacttctcgaaggcgaaatgaatggtctcgtacgaccagttcgtaagcccccatacgccataaccggcggctttcaggtcgcgtagcagccgttccgagccgggcagcaggcgaaccagggaatcgtcgtaacgcgtgatgtaatcctcgaaaatatcggcgatctccttgccgtggtcctgctcgacgcttggtagcacctcagccagggaagcgccatggtccatgcggtcctcatagtcaaagaagccgaactcgtcgtcatccgagcagatgcgatccaccagctcctgcgggtaatgtccttccagccccgcgcgagactgccaatcgaccacgactccgcagaaatcgaaaatgacgtcggtgatggcggggactgcattgaccatggggaaccttcctcgtaaagcgtgtatctgctgttcgtcagtgtagcgtaacggggtggcgtaagcggaatgctggaagcagggggttatcgccgtgccgcattgacgaactcggagaagatggcacggctgcgcgcatcgacgttgtgcaaaaattccggatgccactgcaccgcccacaggaatcgggattccggccggtatacggcttccgtgatgccgtccgtggccgtcgccatgaccttcagcgtcggtgcgacggtccgtacggcctgatgatggtaactgttgacggcgatcgaccagttgccgtcgtcgttgcgtttcatggttgactcgtcgacctgcgattgcggcatgccattgagcatatcgtccagcggcgtgcccggttccacggtcacgtcatggccgaatgcatcgtatggggtcttcatcatatgatgcttcacatcgctcggatgttcgctcggcagatcacgccacagcgtgcctccaaggcaggcgttgatcagctgaatgccgcggcagatccctaacaccggtttgtcgagccggatcatcgtgtcaagcagcggtggctccatcgcatcacgttcggcgctcagttccggcttcgtcgcctgatattcgggtgtgaccttctcgccgtagagcgttggattcacgtcctgcccgccggtgaacaggatgccgtcgcacatatcggccaactggcggatttcatggtcatcggaggttagcggcagcatgatcggcagtccgcctgcctcctcgatgccgtccatgtatccgggtaacagccacaggctgtcccgttcgtaatcgaacaggggagtgatgccgatgatcggacggcttttcatgaatgccacctttcccgtagttgaaccctacgaccctactgatggaacgacagcatagtttcccgatatttcacgattgtgcggtgtgcattgcggggatgtcaagtattcaaccgacggtttcaacgcagtatgtccacgggggcgatggatttgctgcgttcgatgatgcctgagatggtttccggcgattcctggcagccgcggcgtagccacaaccacaatatggacgaagtggatgagacgaggatctccatggcgtattccccggggatgcccggtgtgtcatccggtgcctttcgcagtcgtgacacctgcccgagcagcagttgcttgatgacgtccttgacgcgctcgtacagctgcatgtcgttgccgctgctggagatggcgtcgaagaacgcatagtctcgtttgagatagcgcatggcggatacgaggttgcgggatttaatgatgtcttcgacatcgagcggctcgttgtcatcgtctgattccgggatgagtattgcggccagatctgcgatgacgtcgtcgagcagctggtcgcgcaggtcgaatttgtcgacatagtgcatgtagaaggtgccgcgattgatgtccgcctcgcgagccaggtcgctgacggtcatcgcgtcgaagcctttgttcttgacgagcgtggtgaacgccgctttgattttcgcttccgtcttggtttgtcgttgtcgtaccatgcctgccagtttaaatcaacatgttgtgcattccagtggtaatcaacagttttccataaagcgtctaaactgaacggtttcaggggaaatgatcattgttctgttcatgtcgggaaagatacaatcatgcggaaattaaatcaacatgttgtctattgatggaggcgatacgtcaatggcgtatatcgagatggtgcatagctccaagcgttatcagatgggttccacgaccatcgttgcgaacgatgatgtgagtttcggcatcgagaagggtgagctggcgatcattctgggcgcttcgggtgcgggcaagtcgacggtgctcaacattctgggcggtatggacaccaattccgagggcagggtcgtcgtcgacgggcgggacatctctggctattcggccaagcagttgacggcctatcggcgtacggacatcggtttcgtgttccagttctacaatctggtcgccaatctgacggccagggagaacgtggaactggcctcgcaaatcgtggccgatgccatggatccggtgaaggcgttggcggacgtggggcttgccgaccgtgtggataattttcctgcgcagttgtcgggtggcgagcagcagcgtgtggcgatcgcgcgtgcggtggccaagaatccgaagatcctgttgtgcgatgagccgacgggcgcgttggattacaacacggggaagcaggtgttgcggattttgcaggatatgagtcgtgagaatggtgcgacggtggtgatcgtgacgcataattccgccatcgcgccgatcgccgatcgtgtgatccgcatgcatgacggccgtgtcaccgcggtcgagaccaacgagcatcccatggacattcaggaactcgaatggtgaaacgcatcctatggaaggacattcgtcagacactgtccggctcgataggacgattcgtttcgatcgtctgcctgatggcattgggctcgttcgccctggtcggtctcaaagtggccggtccggacatgcaggccaccggtgccgaattctacgggcgcaacaatcttgccgacgttacggtcgtatccacgtatggactgtccgaagacgataaggacgtcattggcagggctgacggcgtcagaggcatcgaatacggctatttcaaagacgttgtcatcaagggcaccgattccagcatgcgcgtcttctcgaaaccggaacatatctccacctatgacgtggtggagggcaggatgccgaaacggcagggagaaatcgtccttgacctgaaccagcggagcgcattcgctgtgggcagcacgcttgacgtcactgaaaaagccgacatctccggcagtaccgtattgcgtcatcatcgcttcgaagtcgttggtttcgtgcgcgcaagcgaaatcgtatccggactgaacatgggccagtccacatccggcagcggcacactgacctcatacgccgtggccatgccgtcggaattcgactccgaggtgacgatgatcgcacgcatcgtctacaacgatactgagcatcttgactattggacggatgattaccgcgaccgcatacagaaacacaaggaccaactcgtcaaacttcttgccggccaaccggaagcacgagagtcgagcatccgtgagcagcagcaggagaaaatcgatcaggccagacagcaggtcaaggattccgaacagcagctcgccgacgcggaagcgcagcttgccgatgccaaagcgcagatcgcaagcgccaaggaccagatgagcgaaggcgaaacgaccatggtgcaggaaggttccgcggccatcgcacagcttgcgtcggcacaatcgcagatcgcctcggccaacgcgtcggtcgcggccggccaagtgcaactgcagtcggcgcagacgaaactcgtcgaaggacaagaccggctttccgaatcatggaacaagctttccgacgccaaatcgcagctcgatgacgctcgcacccagcttgaactcaccaaaaccatgctcgaccaggccgcagccatgctgaacaagatggaacgggtcggcaccacgggagcggtatacgagcaactcaagcaacggtacgagacggtgctgggccaatacaacacgtccgtgcaggaatacaatgagcggctggaagaatacaacaacggtcttcagcagtatcaggatggcgtgaaccagcttgaacaaggatcgcaggaataccagaacaacgccgacaatcttgcacaggcctccaacctcatagccaacaagcaggcgcaacttggccaagtggcctcgcaggcaagtagtacggccgtagacggagccgaacagctcatcgaaggccgacgaagcatcgagaaggccgaagaagagtacgagagcaaactcgccgaattcaacagcaacaaaccgaaagccgaaaagaaaatagccgaggcgaaaacacggatcgaactggcgcaggaacaggccgacaaccttaccgttcccgcatactcggtcagcggcaggcgtgaagggctcacctcgcagggctaccgcgtctacatggtcattgtgaacatcatcggcaagctggcgaacatcttcccgattttcctgtatttcgtcgcagcgctcgtcaccttcaccaccatggggcgcatggtggacgaggagcgtacgaattccggcacgctgaaagccctcggttatacgaacggcgatgtgatgctcaaattcacggtctacggtttcacggcttcgaccattggaaccgtcatcggtgtgctggccgggcatacggtgcttccgctcatcgtggagcacgcctacagcagtggtttcaccatgccctccatcaagcttggatttcacccgtgggtcacattggtttcgttcctgctagcctggatgagcgcggtcgtgcccacgtggatcgtcgcctcacgggagttgcgcgagaagccggctgccctgctcctaccgaagccaccggcgaaaggctccaagattttcctggagcgtgttacgccgatctggaataggctcaacttcacccgcaaagtgactgcacgcaacatcttccgttacaagatgcgtatgttcatgaccatattcggcgtttgcggcgctgtgtcgctgctcaccgcaggacttggcgtgcaggcgtccatcggtcagataggcgagcggcagttcgacgaactgattcattacgatctgatcgcggtcgaacggtcaagcacgaattccgctcagatcgatgagctcaaaaaagcgttgaacaaggattcggtgagttcctcgatcgccgcacattacgaggaattgtcgaaaacatccggcaaaaacagcgacaaacagcagatcacgctgcttgccacggatgacgcatataatttcggcacgtatctgaccttgcgcgatagatcgtcgcatgagaagcggatcatggtcaacgatggcgcgatcatttcggagcggctctccgaaatgctgcatgtgtccgtgggagacagcttcagcgtgaccgatgcgggcggcgtggaacataccgtcaaagtatccggcatctgcgaaatgtatataggccatttcgtattcatgaacgcgcaatgctatgagaagatgttcggcacggattactcggagaactcgtacatggtgcgtctcaaggattcaagcgtggccaatgcggaacgtcagggcgcgcgactcatgaaactgtccgcagtgcaaagtgtggtgcagaacacgacgcagaagaacatggtgtccacgatcgtggaatcgctcaatcaaatcatggaagtactgatcatcgtcgcagtgatgctggcggtggtgatcctgtacaatctgacgaatctgaacgtgtccgagcgtatccgcgaattgtccaccatcaaagtgctgggattccacaccaatgagacgacgatgtacatctaccgcgaaaccatgctgctgtccggtcttggcattcttgccggctatgggttcggcgcatggctgcacggctatatcgtcaccgaggtgccgccggacgaggtcatgttcgacccggcgcttggatggaaggctttcgtcgtgccactcctagtggtcggcgtggtgttggccgtgcttggttgggtagtgtaccgccgtttgaagacggtcgacatgcttgccgcgctcaagtccgtagaataggacgtcggccgaatggcagcggccatccagcgatcgcatctcgcataagcgcaggtacgagtgccggatgaccgctgccgttatcttcggtgctttgccgcttgacgtcgttcccgactactgcagcagctccatgaacgccgtccggatgccgtcgatgatgtcgctggcaacaatcggatgtccgatcgtgccgaaatgatgatggtgagattgcccgtagattcgcggacgatgccagccgcgctgatcggattgtgattcggccgccgccgcaagaccatgcagataggccgccgcagcggcaacctccggaacgagcgtcggatcgtcggcgagcatgtcatcctgttgtgcgagcatggcgcccagcatgccagccagtacgtccccggcgccggcggtagccagccacgctggcgcccggccggaaagaatcacccgttcctcgccatctccatcctcaccgaccacaatcgtcaccgcacccttgagcagaacggtcgcgccggtcagctcatgggccctgcgggcatacgcaagcggttcggcgtacacgtcgtcgacatcgatgtcggtatgctcaatcctgttcagcaatcgggccaattcgccgacgtgcggagtgatgaccacctgcgccggcacatgttccggcagcagatccagcgctccggcatccaccacgatcggaggcatcgcatgtatgcgttcgttcaactccatggacgacccatcggcatcggaccgttccaacgtgtaatgcttcagcaacgcggcaatcgtctcacgttgcatatcctcatcagccgtttcgtcatcgccggcggggacgcccgaaccgaccacccaggattgcacgcgccctttgccgataactgcctccggcaacgccgaaagcaccatatcctgcgcatgctgcgggcccatgtaacgcaccatgcccgaattcgtacgcgccgcagcccgcgccgacagtactgccgcaccgggataacgggcggaaccggtcaccaacccgaccacaccacgcgaatacttaccgtccgcaagctggggcagacgaatcgaatccgtgacgaaatcaccgtccgtcatctccgccgcgggaatcgaatcgtcaaagtcgaaaccaaaatcaaccagcgtcagcctgccacacgcatacgaggcgggcggcaccatcgcacatggcttcatcgcgccgaacgtcaccgtaacatcagccggaatatacggacccggcaacgaaccgtcattcacacccacgccggaaggcgtatcgatggccaccaccagtggcaaatccgcggacggctcattattcggcagggcgggacggtcaggcagctcgccaaccaaacccaacgaagccgcaatcgtaccggcgacgccacgtagcgcacccgtcacgccgataccggtcatcgcgtcgagaatcacgtgcgagccctgcgcgtactcgacggccgcctgcaggcgctcgccggcctcgcctgcggaaaaaccggtggtgcatccgggaatgtcggcggcgggatcgagcacgagtacacgtccgccggcatgcacgaacgctgcaaaggcctcttcgtgaagggaacggccgacggcgatcgccgtaacctgcgcaccttcctgtgcaagttcggcaccggcatacaggccgtcaccgccgttgtcgccggcgccgaccagcagggtcacgcgcgcgtcctcaacggccagatcctcatcgtcgagcagctccatcgtcacgtgcgccgcggcggatgcggccatgcgcatcagtggaacgccatcgtcgagcaaagggcgttccatctcgcgcacggcatcggaatcataggcgccgtacaagagcgtctgcaggcggtcggcttcattggcggtatccatggaatccctccctttcggtaacgatatcccttactttagtacgtacaattaaagccgtactgtgtctcgtggcggattcaggaatggagatggcaatggcgtatatcgagatggtgcatagctccaagcgttatcagatgggttccacgaccatcgttgcgaacgatgatgtgagtttcggcatcgagaagggtgagctggcgatcattctgggcgcttcgggtgcgggcaagtcgacggtgctcaacattctgggcggtatggacaccaattccgagggcagggtcgtcgtcgacgggcgggacatctctggctattcggccaagcagttgacggcctatcggcgtacggacatcggtttcgtgttccagttctacaatctggtcgccaatctgacggccagggagaacgtggaactggcctcgcaaatcgtggccgatgccatggatccggtgaaggcgttggcggacgtggggcttgccgaccgtgtggataattttcctgcgcagttgtcgggtggcgagcagcagcgtgtggcgatcgcgcgtgcggtggccaagaatccgaagatcctgttgtgcgatgagccgacgggcgcgttggattacaacacggggaagcaggtgttgcggattttgcaggatatgagtcgtgagaatggtgcgacggtggtgatcgtgacgcataattccgccatcgcgccgatcgccgatcgtgtgatccgcatgcatgacggccgtgtcaccgcggtcgagaccaacgagcatcccatggacattcaggaactcgaatggtagccggcatcggaagatgacatcgccccaagcactgcgcgtcgggacaagttcgccacggacggcaccctgcatctcaccgaacaggacaacgggccggggaatcggacggcgtgggcgcaaaggcctatgcgaaacagaaaaaccctcggatttcgagggtttcaacaagctcctgcgactgggcttgaaccagtgaccgtccgattaacagtcggatgctctgccaactgagctacgcaggaataatcccgcatgggaatcgcttcccatactacgctcctgcgactgggcttgaaccagtgaccgtccgattaacagtcggatgctctgccaactgagctacgcaggaatgtgcgtcatgttccggaattgcttccgtgcacaagtcatacatagtacacacattcatcatctatgcaaatcatgcgcgtgtccgacgtgtcgtgatgtgtttccgaccgtgaatgcatcgggttgcaaagtgtcatcggtctcgtcgagctatcgtaggagggtggtttatccgctggcaaaacatagcgtccattcagaaagcggaggataccatgaacgcgtcaacaggcaaatgacaagcaaatggaaggagtccattatgtgcactggcgtccgtttctccgatgcggaaggaaacatgtatttcggccgtaatctcgactggagcttctcctacggagagaccattctggtcaccccgcgtgcctacaagtatgactatgtgttcggagccgaggctaaggccgaaccgaatgcggtgattggcgtcggcgtggtcatggccgacaagccgatgtatttcgactgcgccaacgagaacggactggccatcgcggggcttaacttccccggctacgcctccttcgcccatgagccgatcgacggcaccatcaacgtagccaccttcgaattcccgttgtgggtggcccgtaacttcaataccgtggatgaggtcgaggaagccctgaagaacgtgaccctcgtctcccagatcgtgcccggccagcaggaatccctgctgcactggttcatcggcgatggcacccgtagcatcgtcatcgagcagatggccgacggcatgcacatccaccacgacaacgtggatgtgctcaccaaccagccgaccttcgatttccatatggagaacctgcgcaactacatgtgcgccggcaacgagatggccgaaccgaccacctggggcaaggccgagctgaccgcatggggcgctggcgtgagcatgcacggcatcccgggcgatgtgagctccccgtcccgcttcgttcgcgtggcctacaccaacacccactacccacagcaggccgacgaacagtccaacgtatcgcgtctgttccatactctcggttccgtgcagatggtcgacggctgcgccaagatggctaacggcaagttcgaacgcacgctgttcaccagcggctactccgccaagaccaagacctactacatgaacacctatgatgatccggccatccgctcctatgccatggctgacttcgatatggactcctcggaactgatcactgccgagtaattcttccactttacggattctcggatgatgaggcgccaagacgccccatatattgcggatatggcttgaagggccgggtaagatcgttgaaatcccaatgttcttacccgacccttttcatgtatgcaccgcttggatacggcagaatcccgttatccatccagagatggaagcaaaaggccaatgacgggcaacacaccgagtggacttcgagtgctttaagttcgtacagtgcgagatatgagcactgcaacaaccagatggcatacgattcgcgaggcgtccatgctttcgggacttcccgaatcgacgttgcgttactatgagcagatcggcatcatcgatccgatcgcacgcgatccgagctccggacatcgcgcctattccgatgacgacattcagtcgttggtcaccatctcctgccttgcggcgactggcatgccgttggaatccatgcgagaatacctgagaaaccgcttcgacggtgcggaaggcgcccgcaaacagatggaactgctcgacgcgcagtccatcaggctcgccgccaaggcagaggcgttgcgtatgcagcaatcctacgtagcgttcaaaacgctttactggcgggccatcgccgaaggccacgaagatgaggccgagcggttgctcgaagaaaacaaagacatcatcgataccgtcaaacggcaacaacacgccaaagtcggttcgtgacggaacacatatggaccaaccacacaacaacaaaggagcattcatatgaaggcagcaatctataagggcatcaagcaaatggcatgcgaggaacgcccgaaaccgacaatcatcgacgacggtgacgcaatcatccgcgtagttcgcgcctgcgtatgcggatccgacctgtggttctaccgtgatggacgtgagaccgacacgcagaccggtcatgaggccatcggcgtcgtcgaatctgtcggcgacgatgtcaccatcgccaagccgggcgatttcgtaatcgtgccgttcccgtacagttgcggcaagtgcccggtatgcaaggccggctttgaatccagctgcccgcacggcggctacttcggcagcggcgatggcatgggatgccaggccgaatacctgcgcgtgccggaagccgacggcactctcgtggtcgtgccggcagatgccgaggacctctccgacgagatgctcgcatcgttgctgaccctatccgacgtgatgtcgaccggttaccatgcggcagcctcggccgaagtcaagccgggcgacaccgcggtcgtgttcggcgatggtgcggtcggcctgtgcgcggtactttccgccaagttgatgggagcctcccgcatcatctccatgagccgccatgccgatcgtcagggaatcgcccgcaagttcggcgccactgatttcgttgaggaacgcggcgacgaagccgtggccaaggtactggaaatgaccgacggttacggtgcggacgccgtgctcgaatgcgtgggttccgccttgtcaaacgacaccgccatgaaggtggcccgcgccggcgcggtcgtcggccgtgtcggtctgccgcatgacgtcgaagtcgacattccaggcctcttctatcgcaacgtcggcctgcgcggaggtcctgcgccggtgcgcacctacgacatgcagcgattgcttaaggaagtgcttgacggcaccatcaacccgggcatcgtctacaccagcgaatacacgctcgacgacatccaggaggcatacgccgccatggacgagcggcgtaccgtcaagtcgctgctgcgtatcagcgaagtctgatcgttcgtcgctcccgttgacattcggacggtatggtgtacacggatgaaaacactacgaaaggtagatatgtttgaagaactgcacaggaagatgaactccttttggaataatgaccggacactgtccgagacggatccggaattcatcaagctgttctccgattttgcctacgacgaggtggtgaacgaaccaggagccaatcatcccgaactggatgacaaaacgcgctccttggcgattcttgccgtgttggtcggatgccagggcgttgaggcattcgagatgatgctaccggttgcctatgaggccggattgacgtccgtggccatcaaggagatggtgtatcaggccaccgcatactgcggattcggcaagaccttaccgttcctgaagaagctcaacgacttccttggcgccgccaatgtgcatctgccgctcaaagcgcaaggcaccactacgccggaaactcgtgccgaggcgggcgaggccaaacagatcgagattttcggtgaaggcatgcgcggcttcgcgcaatccggcccggaagagacccggcacatcaacaagtggctggccgacaattgtttcggcgactactatacgcgagacggcctcaacacccgcgaacgcgagatgatcacgctgtgtttccttgccgcacagggtggttgcgagccgcaactgacctcgcacgccagagcgaacatggccgtcggaaacgagaaggcgttcctgattgccgcggtttcccagtgcatgccatacatcggctacccgcgtacgttgaacgcgattcgttgcatcaacgatgctgcgcagggctgagtcgaacgggagcgcatcgaaaggagggtcatccgtgtaatgacggatgaccctcctttgtgtcatgagcggaatcagtcgccccaaacgtccttggccacggactgcacgagcgcgatcttggcccactgctggtcttcggtaagcttgttgccttcctcagtggaggcgaaaccgcactgggtggacaggcacaagcggtccagcggaacgtactgggacgcttcccggatgcgcgctttgatggtttccggatcttcgaggtccggcttctttgaggtgatcagaccgagcacgaccttcttgtcgccggaaacctcggcgagcggcgcgaaatcgccggaacggtcatcgtcgaactcaagatagtaggcgtccacatgctcctcgccgaacagtttggcggagactggggcataaccgcccgaagagagccaagtggagtggaagttgccgcggcacacatgggtggtgatgaccaagtcatccggctggtcggcgattacggcgttgatgacgtcgagattctcctgctgcagacgcagggcatcctcgtcactccagccaagacgctcacgcacgctcctatcgcataggcgggtccacgtgcagtcgtcgaactgtacattgcggcagccggcggcatacaagtcggcgatgacccgacggtaggcggcgacgatatcatcggtcagttcgtcatcgttcccgtagaactcgtcgtacggataggcagaggcgttgccggtgagcacgaaacgggtctgcgcgggggagggcatggtctgacgggccacggtgttttcgtcctcgaactgcttgacgaacttgaaatgctcgacgaacggatggttttcgccggagatcttaccggtcacggtggcggtgtcggccggggtcacctcatcatggaaggcgacacggtgcgcggccgccgcatgatccacgccgttgaagccccacatgaagtcgaaatgccaccagccacggcgaaattcaccgtcggtgattacatgcaggccggcggctttctgcttggccaccagctcggtgatgagcttgtcctccacggccttgagttcggctgcactgattgtgccggcggcgaagtccatacgggcgaccttgagttcggacgggcgcaagtaggaaccgaccacatcggcatggaacggtgcgttatgggaatacgccattggatgctccttcgagtgtcactatcaaatacctacagaacaatacccaacacccccgaagcagacggtcgtgccgtcaaacatatgagatgacggcgattcccgttggccgtaataaggacggtcatccttgattgatgtgttgatttttggtcatcgctgttcctgtgtgcgactacggtacgatacaggacatcgaaacgagagggagcccatcatgaacgttctggcattggcggaggcttggtgggcgcaacacagcatccatcttgatcaggaaccgggcggagatcgtttcggcaccatcatcatcgaaggggatacgcgggcggcaccattgcgcatggtggccataggcgattcgatgatcgccggttgcggcgtcgatgatcaggcgcatggattcactccggatctggcagctgttttctcccgcgtgctgaatcgttccatcgcatgggaatcttatggcaaactcggcgccaccgttcgccgtgtacgctatcgtttgttgccggaggtcgaaggcagggccgatcttctggtgctgtgcgccggctccaacgatttgatggcacgacgtagtctggaggaatggcggaccgatctggccgcggccatcgatgaggcgaagaggctcagtgacaatatcgtcgtgttcagtgcaggacagctttaccgcagtccctctttaggtaaggcattgcgtcaggtcatcaagcgtatgaccgacgaacagaccgccgccagcaaagccatctgcgaacagaagcaggtgctgttcctcgacatgacccatgaagacgtgcatgccgatcaggagcgtttctacgcacatgataatttccatccaagcgactacggctactcctacatggccgaatgcaccgcaacgatgacaggggactggctgaaagcccgtctcggttgatattcgaaggaaatgcgacggcatgaccggtactcatgattgaatgggactgacaaccaaccgcatcgtaaggaatggaaaggcaatgagcgagtcgcacgaccccgcaaatgacggtatcgacatgggcaggccgggggaggtgcgggaaaccgagcatcagggtgcggccgtcaaggcggcattgggtgcgaacatcggcgtcgccattgcgaaactctgcgcggcgttcttcaccggatcgtccgccatgctgtccgaatccgtgcattccatcgccgactgttccaatgaaatcgtgctgatggccggtggccggttctcccggcgccaaaccgatggcgaccatccgtttggcttgtatcgtgccaaatatctggcatcgttcgtcgtggccacgttgctgtttttcgtcggcggattcttctcgacgtccgaagcggtcaagaagctcatcgccatcgttgagcacccggcattgcgtgatgtgaaccggatggaattgctcgtcgcgttcgtcgtggtggtaatcagtgcggttctcgaaggctacggcctgcaccagagtgtcaaggaggccaatgagcgcatggaccgcacggacaccccgcgtatgggaatgtttcggttctggcgccacaccaaatccgctgagcttgcttcggtgattatggaggatacgctcgccctgatcggcctgggcttcgcaggcggcggcatcggacttgcgatgctgcttgacaatgagatgttcgatgcgttgggcggtctgatggtcggccttgtgctgatcgcaggctcgctgctgctggcgttcaaatcgggttcgttgctgatcggcgaggcggtggaaccggatacccgtatgaaaatcgtcaacgcggtcaccaccacgccgggtgtggagcggctattgaacatgcagaccgtgcacatgtcggaagacgacatcctactgtgcgtcaaggtgcagaccagcaagctcgatcgcgactacgacgtcgaaaccgtcgataagatcgagcaggccgtacgtaacgccctgccgtggtacaacttcgaaatctacgtggaacccgacatctacagcgccaggcacgtgcaggcgtaacctgccggctggccggtggaagaaaagccc
